United States Patent Application Publication US 2022/0211063 A1 - sequence listing, part 17

SEQ ID NO: 55 - DNA, 8605616 bp, Penicillium roqueforti (residues 3,442,249-5,163,372 of 8,605,616)
  misc_feature (89143)..(89590): n is a, c, g, or t
  misc_feature (91422)..(91652): n is a, c, g, or t
  misc_feature (329890)..(330026): n is a, c, g, or t
  misc_feature (430777)..(431108): n is a, c, g, or t
  misc_feature (461660)..(461676): n is a, c, g, or t
  misc_feature (496393)..(496572): n is a, c, g, or t
  misc_feature (531997)..(532091): n is a, c, g, or t
  misc_feature (539747)..(539882): n is a, c, g, or t
  misc_feature (569530)..(569734): n is a, c, g, or t
  misc_feature (649047)..(649183): n is a, c, g, or t
  misc_feature (691108)..(691170): n is a, c, g, or t
  misc_feature (866493)..(866657): n is a, c, g, or t
  misc_feature (1032404)..(1091803): n is a, c, g, or t
  misc_feature (1092490)..(1092701): n is a, c, g, or t
  misc_feature (1210158)..(1210370): n is a, c, g, or t
  misc_feature (1240516)..(1246788): n is a, c, g, or t
  misc_feature (1247715)..(1253647): n is a, c, g, or t
  misc_feature (1258266)..(1372265): n is a, c, g, or t
  misc_feature (1374099)..(1374507): n is a, c, g, or t
  misc_feature (1457506)..(1457792): n is a, c, g, or t
  misc_feature (1505319)..(1505491): n is a, c, g, or t
  misc_feature (1513190)..(1513352): n is a, c, g, or t
  misc_feature (1624032)..(1624233): n is a, c, g, or t
  misc_feature (1669142)..(1669347): n is a, c, g, or t
  misc_feature (1761210)..(1761436): n is a, c, g, or t
  misc_feature (1817747)..(1926046): n is a, c, g, or t
  misc_feature (1933147)..(1933397): n is a, c, g, or t
  misc_feature (1963959)..(1964336): n is a, c, g, or t
  misc_feature (2150494)..(2150592): n is a, c, g, or t
  misc_feature (2196724)..(2196932): n is a, c, g, or t
  misc_feature (2250718)..(2250774): n is a, c, g, or t
  misc_feature (2391514)..(2391805): n is a, c, g, or t
  misc_feature (2493520)..(2493751): n is a, c, g, or t
  misc_feature (2532126)..(2532403): n is a, c, g, or t
  misc_feature (2536272)..(2536513): n is a, c, g, or t
  misc_feature (2786514)..(2786770): n is a, c, g, or t
  misc_feature (2859475)..(2859766): n is a, c, g, or t
  misc_feature (2873886)..(2874990): n is a, c, g, or t
  misc_feature (2881507)..(2881812): n is a, c, g, or t
  misc_feature (2897061)..(2897239): n is a, c, g, or t
  misc_feature (3050629)..(3051353): n is a, c, g, or t
  misc_feature (3057144)..(3057395): n is a, c, g, or t
  misc_feature (3069494)..(3069869): n is a, c, g, or t
  misc_feature (3075725)..(3076099): n is a, c, g, or t
  misc_feature (3305006)..(3305103): n is a, c, g, or t
  misc_feature (3318292)..(3318616): n is a, c, g, or t
  misc_feature (3502594)..(3502708): n is a, c, g, or t
  misc_feature (3537879)..(3538462): n is a, c, g, or t
  misc_feature (3783308)..(3783522): n is a, c, g, or t
  misc_feature (3992172)..(3992290): n is a, c, g, or t
  misc_feature (4005072)..(4005335): n is a, c, g, or t
  misc_feature (4027270)..(4027470): n is a, c, g, or t
  misc_feature (4058374)..(4058520): n is a, c, g, or t
  misc_feature (4267290)..(4267327): n is a, c, g, or t
  misc_feature (4352793)..(4353255): n is a, c, g, or t
  misc_feature (4361792)..(4361944): n is a, c, g, or t
  misc_feature (4393710)..(4393943): n is a, c, g, or t
  misc_feature (4451442)..(4451579): n is a, c, g, or t
  misc_feature (4461471)..(4461717): n is a, c, g, or t
  misc_feature (4481177)..(4481295): n is a, c, g, or t
  misc_feature (4533818)..(4533955): n is a, c, g, or t
  misc_feature (4590078)..(4590306): n is a, c, g, or t
  misc_feature (4668900)..(4669232): n is a, c, g, or t
  misc_feature (4737074)..(4737168): n is a, c, g, or t
  misc_feature (4766696)..(4766893): n is a, c, g, or t
  misc_feature (4834476)..(4834783): n is a, c, g, or t
  misc_feature (4927466)..(4928039): n is a, c, g, or t
  misc_feature (4945079)..(4945229): n is a, c, g, or t
  misc_feature (5082499)..(5082647): n is a, c, g, or t
  misc_feature (5112540)..(5113261): n is a, c, g, or t
  misc_feature (5314617)..(5314810): n is a, c, g, or t
  misc_feature (5372550)..(5372977): n is a, c, g, or t
  misc_feature (5458853)..(5458964): n is a, c, g, or t
  misc_feature (5480164)..(5480337): n is a, c, g, or t
  misc_feature (5535306)..(5535320): n is a, c, g, or t
  misc_feature (5567454)..(5567593): n is a, c, g, or t
  misc_feature (5598682)..(5598895): n is a, c, g, or t
  misc_feature (5726706)..(5726784): n is a, c, g, or t
  misc_feature (5743217)..(5743685): n is a, c, g, or t
  misc_feature (5807375)..(5807461): n is a, c, g, or t
  misc_feature (5919721)..(5920399): n is a, c, g, or t
  misc_feature (5921713)..(5922019): n is a, c, g, or t
  misc_feature (5942595)..(5942874): n is a, c, g, or t
  misc_feature (6011060)..(6011355): n is a, c, g, or t
  misc_feature (6324898)..(6325216): n is a, c, g, or t
  misc_feature (6397315)..(6397426): n is a, c, g, or t
  misc_feature (6604582)..(6604752): n is a, c, g, or t
  misc_feature (6843517)..(6849268): n is a, c, g, or t
  misc_feature (6859623)..(6860263): n is a, c, g, or t
  misc_feature (6914980)..(6915767): n is a, c, g, or t
  misc_feature (6919071)..(6923941): n is a, c, g, or t
  misc_feature (6950390)..(6950526): n is a, c, g, or t
  misc_feature (7009957)..(7010194): n is a, c, g, or t
  misc_feature (7088551)..(7088774): n is a, c, g, or t
  misc_feature (7280841)..(7281020): n is a, c, g, or t
  misc_feature (7435200)..(7435325): n is a, c, g, or t
  misc_feature (7579890)..(7580210): n is a, c, g, or t
  misc_feature (7597887)..(7598036): n is a, c, g, or t
  misc_feature (7639101)..(7639217): n is a, c, g, or t
  misc_feature (7648311)..(7648518): n is a, c, g, or t
  misc_feature (8007231)..(8007417): n is a, c, g, or t
  misc_feature (8052974)..(8053439): n is a, c, g, or t
  misc_feature (8129120)..(8129535): n is a, c, g, or t
  misc_feature (8133830)..(8134018): n is a, c, g, or t
  misc_feature (8188105)..(8188254): n is a, c, g, or t
  misc_feature (8239788)..(8240259): n is a, c, g, or t
  misc_feature (8245696)..(8245807): n is a, c, g, or t
  misc_feature (8304973)..(8305563): n is a, c, g, or t
  misc_feature (8313929)..(8318046): n is a, c, g, or t
  misc_feature (8345244)..(8345345): n is a, c, g, or t
  misc_feature (8407624)..(8407830): n is a, c, g, or t
  misc_feature (8424515)..(8424640): n is a, c, g, or t
  misc_feature (8481408)..(8481631): n is a, c, g, or t
  misc_feature (8596929)..(8597175): n is a, c, g, or t
acccgctcaggaatgcgctcacggtcgaagtgtgccagcagatcgattagatggaaatcctgcatcagaagcgggccgttggggccaatgcgctgggacgcctggggatccatgacctatatgtatatggttagaccttacgattaaagggaaataggcagggcctactgggcagccgttagaggccgtgtagaccggagtctcattgtagcggtaggttcctatgaaagagaggggattagtcaatgttatcggctttgacaaggaatgtaaacctactaggctcgttgtcttgacccatgatcgcagattgtctatggagaagagagaaaagtcccgggagcactttggtttatatagggccttcgggggaaccatggaaaagttcaatgaagcccatagccccaccagcatctgatatgaaatcatcctatcaccaactatattgatataaaacaaacatctaaaatgccaggcctaggtcagacgtgtatgctatatccaatcgtaaacaaggccgatgtcatcctctcgggtccacttcccggaattggagtaaaaaaggacaaggaataggtttgtaagtggatggtggccagaccgagagcaagaaatgccaggaggtcaattgttctcccaatatagcagttcgatccgagctcaagcttgtttgttctgtcggcacgatccgagatcgcgaccccgaagatacgaacttggccttgcagagttgttgagctgcagacaagtcagttaatccgcaattttatatccaacaaattcattggactatctagttatcagagtgtgacagcaaccgaaaattccaagggtcagtcccttcaaggtgttgcgcaaggcagtgcctcgacaaagaaccctggatagtgcttcccttagaattagtgcaaggaataatcaaaagctcccagtagagtcgtgcgtgcacagaggattgaaaacaacaagaaaccaaaaccaaaacaaaaaaagctcgctcaatgcgccaatcatatatcttgtatatcgcagggaaagggaaaacccaaagcaaattgagccctgatcaaatcataagaatgggtgggtatatatagcgcttgcgcttcttgagagcctacggatcaatctatttaaaggggcaccaagagtatgctgcaagtgcatgcatgggaaggaacaaggtttaactggtaggagtgggcgccgaggtgatcgcaggcgagttagtggactcatcccgacatcccgacatgtttcccaggctatcacaggtcgaggaagagggcgaggcagaagtagcggtagtcgtagccaccgtgctcgttccgtcacggcagccaaaccaccctgggtcatgacagctggtcgttgcagtcaccgagggcaaagtagtagtcaccgtgggtgacggaatggctgttgtggtaggatccttgcacccgaaccagccaggagtcttgcatgtagtagtagtggcagtgcttgtcggtgaagttgttgtcgtagtggtagcggttgtactttcatccagacagccccaccacccgggggtcttgcaagtagaagttctggtgggagatgcggtggtggtggtagtcgtagtagtcgtgacatcggagccgttgcttcggaagaacttccagagttcacagtcaaagcattcttcctctgcgacacatgaagggacattgtcgtatttcaagataacatcagatatcacattctcgatcttgtgggtaccaagaccgacacgccagcccttgtctgccacagtgtcatacgtgcacatttgtccggtgtgacatgctgactccatcgcatagccgccccatgtacaaatagagttgattccattgcaggttcccatatagattgggtctgctgtatgtccaaagtggtaggatccagtgaactctcgcgactgtggaaaccgcgggtcatagcctggcggacttgggaggccaagtcgagctgcgggcaatgcttcaggaacggcctcgaaagtgaccacaggcaatccgaacgtcaatccaaccagactcgtcatggcaccacccagcgaatgaccggtcatccaaatatttgcatctgggtagatctcggtaacgttagagtataaatcgatcgctgcccgataataacggttttcgtcattcatagactcaacgatacatgtcagatttgccgtaaatgtagcactttggcaatcgcaggattgtctccatagatatgagcctccttggccacaacaacaactaaagaataaattatcgttgactttatcgtttgttgtggtgccagcgccatcaaagagagcgggcgaagtgcccttcagagaaatgacaacagtgtcgttcgtcttatcggagtagatgtgccctctcaggccatccgtttgccaaccaaagctccccgaatagttgaatttgccattaatagtgtgccactctcctgttccaggctcctcaatatagtcatttgcagtcatttgtgcaaatgtcaaaacagtctgcttatctgtaatattcggtccaggcaaggtgtccatgacccattccagtggagacaaggcggtcgcaaagcccgaagaccgtgcagctgccaagtgaccttgaatcacctggagtcgccgatcggctaatcgttgtatcgtgagaggacttgatgaggcaagcagagtggaatttgatgcaatatattcttcttcgtggccatcttcggatatagttcgaaggcgagtgtctggcttgacgtcgagtctcgcatgaaagtcgggttgttcataggtgcctcggtgaaagatgtggcgcaaggactataagcgggtatgatggtcagctacagataagaaaacttgagtcaggcatcttacaaactcatgggtgtctggtgtaccctcgtccccattcaaaggtatgacgggaacttgtggagagggtagatgatagcctgaggcggaggcagcacctgacaatactgcagccgcaaataataggctgcggatgctgatttcaaatcgtgaacattttcgagccatgatggggatgctgatgaggatcaaggtcaaggagacgtgagtctatcgcggttatcagcaagtcacttatcaagtgacgaagtgacgcagtgcggagagcgatcggcacgtgatgggtacccccgtgacgtgatgcgatatcgtgtattcctcgtcaatttggtgtcttctcaaatgatcactaggagagtgatacgctgctgttgatcagctgcagtatactccgtgacaagtacggagtactccgtacttccgatcgctttactactggacaacaggctcaggccagagctaggggctctcggacgcggatcgacatcggcctatcagctgcatccgggagcggagacacgcaattagtgccttatagaaccccatcgcccctggtcttaaaatgtctggctctgaaaatagcagtcggcctcatctgaatctagcacggtcattcatcagaatgggcgactcggaagtgaaatctcctacgattgagcaagattccaaaacagcacctccatcgtcacctgtcaataatgaggggcaggaaaatggactcgacgtattcgaaagaccgggctccgcagactccggcacaacaggcgatgcccagacagatgatggctttgtgctttcgcgaagcgtacaagacccttcggaggaattgccgatcgaactaatcagcctggcagatcggtaagcgtgatcatatgagtgcccatgcttcaacgttttattctgacagccatttctttaatagattcgtgaattctctgagcgccaaagttcataactcgcctcccacgatcgagaagatctccgagctcttccaagttttctacagccgcgccgagtcccacattgccacacatatatctgctctcatagctcgtatcaaccgggatcttccgccccaggttcctgcaaaagctccacgaggaagcgcactgtcgaaattgagcagtaaacgctctcaagacgatatcaggccagcagcttcaggtcgccaaatgttgactgcgtccgaggtggctgaaaagcgacaggctcgcagagcccttgaaaacaaaaggagcgcattagaagaggctgccgaaagaagggtctgcgagctggtttatgataaactctggaggcacaaaagtacattggatgatgtgcgggatgaaaagttgcgttccaagactgcggctttgctgctggtcggcattaatctaaaggatcttgggatcgatatagaccttgaaacaatcgatgagcagaagcaggacgaagcaaacgaattcctttgtcaggcccgagagtatctcgccaaaatgaacgattacaaatacccccttggaaagctacagcaactcgcagcggcgcacaaggccatcgtcgacgctctcactaaacttttaccgtcttcctcttctgcggatgagattctgcccacgttaatttattcgcttgtgacgtgccctccggaagggatcaacattgtcagcaacttggtttttatccagcgtttcaggtcttcaagcagaattgacggagaaacggcttactgcttaaccaatctagaggcggccataagctttttggaaaacgtcgatctttctacactacgtgccgatgagctgcaggatggccctctgaaaacccccggtgaaactacgacactatccgtagaacatgtcgatccttttcggccccccaaggaggctacaaccttggctgtgacgactgtatctgcatcgccggaattgtcaacaccagaaatcaaggaacccgcctctacattacctagacctcgaccctccatcacaccacagcaacgacgcctcagtaacattttccaaccgccttctaaggtcctcggagctgcaaatgatgctgttcgcaccactgcagaccagagtttgaagaacattggtgctacattggacagcagtttcaactttctgtttggtcgtctgaaggagatgcaaaacatccaaggaccaggcccggagggtagcggtccaatattgccaaagacactggccgaagctcgccgtctagtgagcttgccgcttgcctctgctaccaaccaaaatctgacccaaggggagctcgcagcaatcaattctgtttccgtggatgagagcacacccccacgcagtagttcgagactcacagatctctccaacactcctacccctcgagaccgaagtgtggacagcactcgaactcagggaagcggtaaaaagtccgtcacgacatcactacgcgaagattttgcattgagttcacccataagccccactccgttagaatcaatgcgaaactttggcagcacgcttaaccctctgaaccacatcccgggcatgatgaagagctttggccgcaacgcaccagagactcccagcggcaggtccgtatccccatcgggattggacagactcaagccatcacctgtttcagcagacggcaatagtggttctaacagcccgctctccaacccttcatcgaaaattgatcctcccattcagcgtttccttgagacacagaatgcgagtgatctccggatcggggacgtagctgttctactggaagactataagcgacttgctgctgcgcttcacaaacctagtaccgagtcttgatatgtttatggttggattatgttgttttgtccttcacattcattgcaacgggagatggagtattcttgcattatggatcgatggcgttattatatctggtattctatttcatttgggcgaataaaccttgagttagatagcatagctctggcgagtgagctacgcattgtccatatcatacatcattttagcaataatcaacccttcagaccaacatgaataaggatttcaagattcggagatagtgtgcacagttacatgttttgcttattcgttcaatatcccgaaaaggatgcttttgttcaagttggagatttacatgaagcgcacaggcggaggccaaatcctatccttctcccctggagcatccttcgaccaacgtgctgctttatgaagcattttcaactccaatatgttgcgatacggccgacgatttacctctggggaaagatctcgttgggtgaaacgcgcaaaaagtgtcggagcgatgtggttgatatgcaccttgagtggctttgcagtgttttcattgtcaggttctagtaaccagacgaatggtctaggaacatcacacgattgcaaggaatcttgatccacatagagaaaggagtctcgtcgtagaccaacagggaattcgttgctgtctcgcatagaagcgaatcgatcccggaaattaccggtaccatcaccggtgtcatcattttctacccaatgaagagcaaactttgcaaaagcagattctttcactaaggtcttagcacattgtaagccgtgttgaacggcagtttggatttgctccttgtacgacggccactcctggacatcacaaatggtaattttcggcgtcaattccgcaggtcctcatattctaggtgtaaaaggggtataaaaatatgaacatgaataaatcgagtcctgcagtggctaattgggcataacacaatcatctcaaacaacataagggttaatgataagagtaagagagctatttcgcaatcacgggtggcgtccacgcagaacctctgcaccgccagttctcatctcggtcaatttattcgtcaattccaaactttgtgtttcaacttggtcatggcggcgcttgacttcggcttcaaacacagcagctgtgcgacgacgggcacgccgtaaattcttcatttccgaaagaagatgggtgaaacggtcgatcatttggtctccacagtcttcccattcatccatggtcatgtgggacaaatatgtttggcgttcttggtccgtcagagtcaacagatgggagacggaattattgggtacctcagtatctgtgacaagagatggtgggtttggcggcaaggaaggtgatttgatgacaggtggaggaggggtcggcgatttgtcaaatggctcagcttggagttcagagaaagacttttggtaaagcacttctggagggtagtctgcttcaagtgatcgctttttcgaatggatggcagtgttgcgacggctgcgacgcgatggctcatgcaatttgcgcgattcgtgcacaaaaaacggatcctgcatggtgtggtcgacgtctaagtcggttaaactggtcatatcgaaggcactgattgaaaccccgccgctttcccgtcgttcatccgggcgtatggtgtgctccatgccatcgtcacttccaccgtcactatcggtaagttcgtgaaacgatgtaatgctgagtgtccggccaacatctggcggaggttgagagtcatggcgagtaggtgatgcatcgagttgttggtcgagttgttcgagaagtgaaggctttggcgggctgaaacgtgtcctgggtattgctgacgagctgtgagggagaagaatcttcctgggcccagtaggaggaagcatttgacccaatttccgcggccttgacgtcggttgtggttgtggttgagtctgaggctcgggatcagagtctatagtgacaggctgccgcgaagaagttctctttctgctggcggaccagaaattctctaggcgcttgctcaatggctcctcggttatacgtgatttgtgcgacgcatgccagtcgtgtgcttcgtcggacttttcattatccccgccatctccgccaagagacgaagtcatttggctttcagagtcatcgaagtcatctgaatcaaagccggccttcttcatggcttggtcacccaggccttcataccagttaggcccataagtatggattgaaggtcggggctgatacatcgattgaggatcgggattggtgtaggcagcattagtacttgatgctgcctgagatttgttgtcatcaaatccgtagacactagtccctgccacggttgaatcatcaatcgcttccacgtctgtgtcgaacacgtccctgtctcgctgtatcccatgcgtagagagattgcgggactgatttggaaattgagatgtaccgttaaattctagagatccagatctgccattggcccctgaaggacctggatcgaccagctgggtgaccggtacctcgactctggcttgttctgcacgttgctggcgcgactgggtggcttggccgtgagcctgcccaccttctttggagtggacataatcgccaacccccatagtactttttgaagctagctattgtaggggtaatgaataaatgtggtctttttcgatgacgctgaaagacgacggggtccaccgtaaggttgttgggcaaacgcgatatcgccgcgtagtcacgtgtcgatcatttccaccggctttaagcctcatctacagcaattagggccgccacggctgtatggaaccttacagcggcggtaacctccgggtataaatcccgaacaacatttagctaatgtgcttgactaaattgtgaataccagggccaactaacgccacataagggtgtaaatctttctctaggatactgggcaagggaggtttctaattataagataatgtttacctataaataaatgcatttcattggggtatattaagtataattttacatgaagttccagaagagaggaacatcaagatcatctcaaccaggacctcaatcagcagaatcatcatcaatatgaagactctccagattgtatgcaacacccctgcctcgtttcttggccttctcgaagagctcaatcgatctttggacttcagctgctttcttttcggttgcaagcctgtgctcacgtctcgcttcaagagagcctggggtcctatccatgagcattgggtcgtggtcgtcgtagtcttcgaagtgggccggtaatggtagagtgagcagcaacagatcaccgatccacaaacagatcatgcctctgagctccagcaattctggcgagtccgagtatggaggagaccctaggagctggtccatacgcgcagcaatttgctgcgcctgtgccaactccagtgccctaattgctgtgatggcagcatctgtcttgttttgtgacttccgagggtggccaaattcagattctgaattgtcatcctcagaaaactcatcaggctcttcttcttggcgaagggtaatatttttcctagttgccttgctttcttcctgtgtgatatacacccaaagcccaaacattgcagggtagaagtgcaaagaggagatagactgtggtgaagatttcatgaatgggtgattgagaataagtcgttcataatattctttagctgccgcaaagcccttggtggtaaaattgatgggtgtgctgtccatcgcattcggcaccttaatggtaccaagattggctgggatttcctgttcgtcacgccgtagcaaaatttcagcgccaatgccccaccttccttcactgcggacgtccattcgaaagcctctgtaatcttcgcgcaagatcatgccccaagctcgtccggctcgaacgtaatcaccttggagcatacatcgatgtaaaatggctgtcaatgcacttaggtgttggaagcgaaggttgccttgctgggtcgactgaggagggtagattggaggtgataatcccgctaagtctttgaggtggcgtgaggcagtctctcttctagattgctcatcattatctgccttatgagggaaatggcctttcggcaattcttggttggatgggaaaccggcaattcggtattgatgggattcatttggtgtcaagaccaagggaggcccagcgggctcagattccgtagccgaggcgatatccgttgtttcttcgccgttcagctcgctttcactccaccccacactccttttgcgtttccggcggtcatatcgagatacgcgagtgccaggcggctggagccaaggcggtagcggtagagaaaaaatcgaagacgacagcgcagccatatgctcaagatggggcgtattccatgtgccgccaaagaaaataagagccgtggcagtctatactagggcctaggctattgttgccccaattgatggttgcgcatttgtcagagagattggtggtggaacatgacggaatggagatgtgttgcctcaggcactcaaggcgaagcaaagcaggcaaacatcatcacttatcgtcctctatcaattgcttgctttgacatgactcctctactcctccttttactttcccttttcttctagttccccctttttgttttgccgagcgctctctcacccccgtttcgcgcttgccagtcgctggctgttcttttctgggcgtggttaccatagctccccgagattcaaggctcggcggttataccactcggagtgtgggctgtgcctagactcatcagacagtttgatacatctggccgctgttgctcgtattgggcagtgaaattgtctcaggcgtctcgtaccttttgcaaataacccggtaaccgcgaactccctgtccgctatccactcctttgttccaaaggtccgaaatacggcttcttcagaagcaccacccaaaaaccaaccgcatcgaccctgtcagcttgagcaagggatcaacaccattcccagacatcacttggatagccttacttgtcaaatccatctcctaggttcaacccaatatcgatacggtcgccgctactagccatatggtcctcgcgtggcaatgaacagtcgttgacactgcatcactccaacggtcacaactctgttactatgggacagtcctcttctacacaacgtgatccatccaataacggctatcgagtacactttgcacctttctcaatacagcgtggccctaacacgagggatgaaaacatgaatcatagacaggcggctgaacacaacggagagggtggtttgccaccccggccagacatgaacatacataataggagtgaccaagatatggcatccgaccggccaggccgaacctccgctgggggctcacaacctatgcgaagtatcgaagaggagggcgggcccgaatatgagctcccaccccgcgaataccgcactgcggcgtttgctcgaatggcagcacgaagacaatcgaccatgtcaagactgggctctaggcttcttccaaattcagtcattcgtggacttctcaacagtcaagaagagaccccggccgagggacatgcacatcgacacggcctagtctctccaagagctgagactgctcaaacatccggtcggttcagtgcgttcgattcattcggctccagaggaattactcggcgccgatctgctcgcgcgccatatttcattccaccccgtccggagtctgctgggatcccagatgcaccagcaaccccgacatacatcgactctccatctcaaatacctgacccgacaagagcatcctggcgtcgcagtgtcaggctacaacgcatgcgtcattcgatttcatctcccatttctcacatgttcggccagccacactcagatttgcggccgcacgaaagcccggaatacccaatgtcagatcctttatttgatgatagggctatggacacgcgtctggacttcggcgaacccccccatgaacttgaatcactagaaccatcaatccaggctgagaggccggtaactgattcgtcttctgcgcagccgagtcctgctttgatgcgccgattgcctgggatcatccgagcaagatcatccagagtcctgcgacgagaggagcaaacacctctgtcaagggtccttcagctcgccgcatccgcaattgcagctcagctgtccggcactgccggtcctgcgttgcctaacatccaggcattgggcaatgacgggttagatggctctttggagaatttcatccagagtttgcagcacgcgacttctgcgcaggctcaaccgcctgcagcagacgggtcgagcagtactgcaaacgaaggaccctcgcatcccgtcaatttcttgcgtgtgttccgatttgccaattcagaaccatccacaagcggcgctgcaaggcagagcgcgagtggtgtcggcgaccatgggacccaaaccgatggaatggacatcgacgagcctgctgaaggcgcagggcgaacggttacactggttgtcgttggagttcggtccgtcctggccggaaacgcaggtcataccgaacagcaacagcccgtaagtccgggcccaggtctagatgctctgcttggtctgccatttttgccacataatactactatcccacggcctcaagatgccactggtgaacctacccaacggagcgatgggcgatctagattgactcttcctcggaaccccaccggagctacagaacttccacgcccgtcagttcccaatcactttagaagaatgtctgataccggcccccgtgctggattcccatcctatcatccgtctggtttctctgaaagtcccccgggaccacacccgcctccgtcaacaccagctgaacaggggatatctgctttatcctccggcacttcgactccgagccgtagaccatcctccgcttcagcaattgctcctgatattctgccccatctacatgaaggccaggcaatgcgaccgacggcggagactctggatgagcctgtgacattcaataccgctcgccagcgacgtcgaagcgattctgagtatgctcgtcatcgggccctcggctctggtgctgttcgacgcaatggcatggttgaacccgatcaacccccaccaagtggaggtcgcagttggttaatttatgttgttggaaccaacctttctgaaaaccacccggctttgaccacacctagtcttttcaccgatgtaagaatgccctactactcggctttgtcaggaacatgatgactaatactttaaacagaacccaacctacgaggatatgatcctactttcatcactattaggtccagctaaaccccctgtcgcctctcagaccgatatcaactccgccggcggaatattccgtcttgtcgagtatgcaggttcattggtcgccgaagccgtcgaaggcgctgcctccattcaaatccaagatggggagcgctgtttgatatgcttgagtgattatgaggtggcggaagaagttcgagagctgaataaatgcaaacatgtcttccacaaggattgcatagaccaggtttgttgcctctgtccattcgatttcaatctgttcgcttgctgaccgtatttcgtagtggttaaccactgggagaaactcttgtcctctctgccgaggtcaaggcgtcaacgaaacccccagcaacgactccaataccgacaactcggtacccagtcctgcccctgctccggctccggctccagatggcacagctgtctgatctcttccacctagcaagcatggtcaacccaactatgtgagcaactcccaccttttggctttcgaaattcttctctccttttagctttagcatgcagcgtgtgtttagaacctgtaacgatttttttctccatggatatcccctttgcatctcatttctgtgcatcgacttttggtgcttttatcatgttgggttatcgaatatttggtctcggcgcctagaaacaaggaaccctcctcttggaagataactctgacttcgagcctcgagaatgttagtctttacgtctatcaattgttggtcttcgtttgttctttgtaatttcgtaaattgacacattggctggccatacccatggctctatctggctaggaaatgttctactcattgaaatacatgtacaaacaataaggctatacaaccatctatcatattattgccattgatgttccctgtatatatacgtggtagtataccggggcccgctgccccgcggctgacttaggtaatccaaaaaaaatcacccaactccattgcggcctggattgcgccagcgatcttgtgctatttcgtttattccctaagctttgagagtagaatctgcagtctctctaacaaaggcagtactcaattgacctcaccgcatccgaaaaacggttcggccgtgtagtctacactttcaacctccggagtccgcattttcacgacaacccccgctacaacccaccatgacttccccgattcgcgtcacagtcctcatatctggcaatggctcaaacctacaagccgtgatggataaagtggccgcaggtcagataaacgcaacaatcgtccgcgtaatctccaaccgcaagaccgcatttggcctcgagcgcgcaaccaaggccaatatcccaaccgaataccacaacctggtcaagtacaagaagcagcaccccgcgacaccggaaggtattcagctcgcgcgcgaggaatacgatgccgagctcgctcggctgatccttgtcgacgcgccggagctggtcgtgtgcctcggcttcatgcatattctctcaccgcagttcttggagcctctggaggctgctaagataaggattattaacttgcaccccgcgctgcccggggcgttcaatggcgttgtaagtcctagagctctttttgagattgtacattgttagctggaatgatatgctgatacctgtcttgttgatttttagaatgcgattggccgtgctcatgctgcgtggttggcggaccagactgacaagaccggtgttatgatgcacgatgtcatttccgaggtggatatgggtacaccaattctagtgcgggagatccccttccggaagggccaggatgagaacctcgagacctttgaaactcgggtccatgagatcgagtggggagtcgttgttgaaggagtggataaagtggtaaaggaattgatggcccagaaagaaaaaggctcaagtgcatgaatagttacccatttgtcttgggtgacattattacttcgcatggtgtacgaagggacgccgcgcttctcgatctgcattttgttggaccaatgatcgacctaggactgcaagtcccgcatgatgccatcttcggggctgttgacgatttatgactgtatatcttgtatgattgcagaaaaacaaaaagacatatatatgatcatattgcaaggtgtatatttcacgtgttctggggtgccaatttggagatcaaagccgcggcgtggattaagacaagaccaagacatccactaccaactggaggaaagccaagaacgtgccgagactaccgttcagacatacttcgtatccacgtggacaatcatgattcatacctgtctcatggtacggaagcacggagtcatgatagtggaaataagaaatggagaatcataaatccaacggcgccccaagccaagctccttgataatcaacagggatgtggaatgcaaccatttcaccggtcgaattctcatcacacgccagtcctgcacggcggatttagctgcatactagcccctccaatagggaactatactatctttgggaagtttatgcctggctaccctacggactagtccattcaaagtcaggcttgcgaaccgcatttgaactatgtctcccacctgcgcatcccgggtaatcattcgggggatttgtatgaccccgccttatctgtaacgtaggacagatcataaacgcagttcacgcgggaaaagcatacactagcaaaagagggtaggcgtggtccatgcagtgcaaccaagacaaaaaagtgggcaatcagagcgttgcagcgctaaggtggccgttggacctatgatcgtggcgccaacgtgatagatcaaagtcaattcctaacgtcttggttcaaggttgtctgatggctccaccgttcctaattccgtcggatgttgggcttgatggtggattgcaacgatgtgggttacttttggccccaaattcacaccggcgttaactcaagctgtccggacatttgagatcggcgaatatcatatccatttcgagcgcggactgggatctgtcatggccaagtttgggggctctgatagtggttatgctttgcttgtttcatgcgcttgatacaacatagacgataataactgaacccccattttgtacagtgaagacagacatccgaggttataggatgatcattacttgacctgatactattttgaaaatcggggtagtcagctccgactgccgagaataggaccaaccactttatatccacctattaggatagtacggagtatatatccatgactatggtaaaaaaatcaccacaacactgctttataatacctttaacccgccatggtaaccaataatagagagcttggcttgtaaacttccgggccgacatatttttacaagaaagacacttttcttcgtggcgcgcaatgacgacaatcttgaacaaccttttaggaaaatgcgcaatacaaagtagacctctaggaacgaactttgatctcggcatatcaaaaaacagaagggaaaaaagaacaaaaagggggtgataatgacgatcccaagccacagggatgaatccgagtggtcttcgggcttggccaggcctactacaatgcagaggatcatgatcatagcgtctatggatctgtcccggtttccccgaggcattttgtgtacggagactccgtactccatattgtcttgcctttttctttttcgttttcgcattttgcttttgtctcttcatatcgactggggactggtggatccaaaacaaaactacggagtaacaagggcgattatccgttgttaagctatctgtgactgtacggagtactccgtactccatttaatcttcgagccgggagtcccgcaattaaataaaaagctagattcggcaattctaaatccttcgagtgcgtactccgtagataaaaaggaatgccgaaaatgttctgctgatggagatctgttctaagtggaggcggctgtagtgtgggaatcaggtcctcattcgagaatcggagaaacaatagtctctcattaaatgtggggggacattttagttcctttttcttttcctttctgtcttttctctggtcaaaaagtactccggagtcccgccgttgtaaaatgcagctgtagtaactagcaccgtgcctgatcgacagtaagttgacagagaaggtgggcctggcagatcgaagacactaaaagcgttggactgacttcaatactgactcgagtatctccatttggctagaagcttcgtccaggagctgcatcacccccaatttgacttacagcaccagtgcggatatcgaaatataggggtaagggggttgcatgtagattgcaactctatcaaacgaaaatgatacatagtacctacctaaatgataatcccgaagcatatttcaaggccccaaagctctggccacatttaacccataattaaatgtctgggcagtgcacgagcatttaatctccatgtgggtgagatataagggctaagacaacgctagtggaccaccacctggcggccctgaggctcctaagggggtttttcgggggggttttgggggtttttttgtctcgcaacgtccctacaatggtatctcatgcatcaagcttggtctaggcggatctaaataatatctctgccaggttgttatacggactaagtccgccatagatcctggtagaagttaaagtccccactaaatcttttgccactattcccgatttagtatcatttagagagcaacaaggttccaagggagagcactgactgttagtgagatcagcaggcagaaaaaagtggttctctggtggactcgctggagatcatatggcgttgtgatttgcaaggtgcgtgcgccgaatatgaaaccggtgcattagtatacgacgttcagccctgttgtcttggtcaaattgaatagcaatagagttttattagatgttcctgatcttcgttgaatagggggggctacataggatagtgatgttggcagtgtaacttgacacctactttgtataccaagacccatatgtggctccaatgaaataagttttgatatagagcaaagatcttctacatcagcccatactatatccacaatttcatattccgtatttccataccctactcttctgaagctcagaataccacgttgtacggagtacatatcgcattagatacatgaaccggttgcagatcacgctttagcttctagtctggaggcgctaaaagaaaattgtaggagtaattaaaacgaatgaaatcagtcgtcacatttttaattcgtaaattgtcgcttttatagccaaatccatgttttttcctttttgcttcttccaaggttcctttttaatctccgcacgtcccggtcactgacgtcccccaccaacttcatctctcctctccaagctttctttgataataagaatgacgactcggtattgttgaattggatggaattaagaggattcaagggggagtttgaatgggttttgtgatccgacaatgacgcattcacagtcgccccagacggccatgtcgggctttctggactcaatcaaacaggattcaagctcatcttcgtattccttgtttggaccgaaacagtattccgagagtgttgcgttttggcacgatccctccgcggcaccgacaatggtagtgcccccttcgcatacaacctcccagaaacaactctcggaccagaagaagcataagcgcacccggagcggctgcttcacctgccgttcgcgccgggtcaagtgcgacgagaaccgtccagtctgtgaacggtgtaggaaagggaaccgcgattgtgtctatccgtcacccaccgcatcgtcgtccgcatcgtccgtaccctcgaaacctagctcacgctccacagccaagtcgcgtgcaagtcgcccgcactctcacggcagtgattcatcctcgaaggtagactccgagtctctcagccctttgcatcccatcatcgacgaagaggaacccgacagttctgtatccgaatcccgaccgtcgccagcaagcgccacaaccacatcacagccggacctgcgtaagagtcaaagcgcacaatcacttcggaaacatggtgcaagacccgcgtccgacactagttcttacatcaaagaacagagtagttcgccatcaactgggtcaccgcgctttgagtcggtgagtgtgcgctcgggcagccttggacattccacaaccgaactgctcaacaacgcacgcctaccggacgatttgcgattctatttaaatttccaccaggattttatgactcctccgcatttcttcttgcgacataattcttcctatttcatccaccacagtcttatcgaacttgcattgcaatatgagcctctcctctacgccctggtgggcttttcggcctaccactattctttacacagccctggggggaagctctacacatttttgaaatactataataaagccttgactctcctacgaaaatctttgagttctggagaggagcacagtgaggctacactatgtactgttctagttctgacaacctttgaggtatattgctcctgcctcccccaagtaccgacatctttctgactttgttgcacttataggaattcattggcgactggatgaatatgatcgatcaccaccaggcggcacatgcattcatgcgaaagctaatcacaccagagtctgccaacatgaacgagctacataccaatatcttcttatggtacgcgcgctttgatgtagtcgtggggattttgtccggcaccgaaacagtcctcggtcgagattggtatcttgcaaaggagcagcatgatgccgagcaagccgctttctatccggatgatccatccaaacaactcgcccttgtagcatcaatcaaccgacgattcggcttggatatggcttccctctatgcgaagttatctcgcggcatgttatcaatggaacaattcgccattcagaacgaccagctgggccaatggctcgagcaggccaagacgattcttaggggattcgatgattacgaatacaagatccaacattacccgcagaagcaacccttgaccgaagatgacgttatcgatccatacgtcccaggtgtcttgtatcgaggtcctttgtgggatttcaactatgcttggatagacattctcgccaccgagacaatgtacaagttccagaccatgcaagtcctgcagcagcctttgcttgaagacttgcaaacattggctaaggagcaatgtcgcataatcgagacgatgattcgctggcctcacaaggaaaacggatattgcatcaactttaaaaacagccttggcatgttgggcatgttcctacccacggagcatcagcataagtatcaaatgtgggcccgacgcacattagcgttgttagagcaacatgggtaagctttcaccggcgtatctgcgtttcagatataaatcagcaagagcaaagctaaccaggagtcatctatgcgaataggtacatcatcgtccctagtttccgcgccgggctagctgccatctggcaagttccagaggttaactattggtggctccctaacgatgaagggtatacaagcattgtccgcgagattcgctccttgaccgacgaacgctcaacacagccacgcgatgagaaacgtgagaccgttcgtgatatgaagtccctcttcgggaagttgaatctggatgaaaccgacgacgacaaaagcccaccatagtgatcttgtgaatgaggtcctttgtatttgcgtcgtctatctccggtccctgagttttcgtggtcttacaagtacagtctccgctattcttggatcagtactgtcctcccgacattttcacatcgaaacgcaaaacatatatgcttactagtcaccctgacaacccgggcaactaatccgacttacgtcctgcgactggatggcacaagaccaagtctcagttgagaacgtttcattggatatcgactcacacctttcatcctttgctctgcttttgccgccctctcacatcctctcgccttctctcgaaatactcttgctatataatgtcttatccacatcctccctcgccttttctacctggtcatactatcatccccccttccccctggaccccgaagacgtctttctcggtcatgacttgatgtacattattatacccaaatccatataggatcattgactgatgccgttcattataccttgtttatacgtccctgctttcaagatttttcctcttttttacataagccgaacagcaagccccgggcctgtaggtgcagagtcctaatgttaggaatgagcacaggttgatggtgatagtagagtatctcctaagaatcaacccgacacccgggcctccacggcacctcctcggctattatgacagtctccaacccacccgccaactctccagcacctccaactccaaaatcatccccctccatatcctccccccacggcaaggcatcaacatcaacctcccatcccagcaaacaccgcagtataaccccagctccagccttactcataacaacattcatctccttgcatcgctcatcacaaacacactccacacagccctgcggcgtaatacaggaacaagcctcaatgcgcgaaaccgcccgccggagaagcagcccaataaactcaaacgccttactagcaataccagaaccacacgacccacctttcgcatcgtagaaggtaagccgagcaggcctctgtcgcgaaggcggtttaagcttctcctcgaactcaacgggtacattcgcgcgctgcagcggccggccaagctctttcttcgcgactttgcattcagtgcggacgtcaccgggcgaggagacaacgaaggagggcaggagcgagaggacggcgtgctcagcggcgtggatggccgcggctatgtttagccggtgcgattgtaggatgtcgatagcgcgcgttgggacgtctagccacatgcccttggtgagacggtcgattggcgggttatcgacggcaacggcgtcgaggacgcggccgcgcttgtcgactttgaaaaagccgtagactacggcgtggattttgattgcgccgaagaaggcggacgaggcggaggggtcgttgccgaccagacgcattgcttcggtttctatggggtcgatgtcggtgaagtcgcgttgcatggtgttccagtcgacgtggacgcgtacgacgcgtgctaggaaggattcggtgtttagttctttaactaggtaagttgtgccttggtggaggaagatcccgccttcgtaaattgtgaataaggcgcgcgatgcttcgacttcttctatgactatgttgcggttgttggtcgtgtctatgacggcgaagtgttggtcttctgtgtcgcgtattgagacactgcgggatggctgtggacggaatcgtgggtggcagtggtagaagccgagtgaatcttttattaggcgagtcggggccagggcaaggagctgttgcccgaagtagatgctgtcttcttcggggcggataggcatctcaaatgcagcacattgaacgtggccttcgaggatgagctcgttggatagatctatctgcagctcacaattcggtcgcgtgaagatttcatctggattcttcatgtagtgttggtcagttgggtatctatccccgactaggacggatagggagtccttattgcgtcgtccagcgcggccgctttgttggcgtaaattggagatcgagtatgggaagcccatggtgatgactgcatccagggagccaatatcaacgcccaattctagagcgttggtagccacgattcccatcaatttcccctcgaacatctccttttcgatttggcgtcgatcttgagggctatagccgcctcggtagcccatcactagcttgccaatctctgttcgttcgagtctaccaaattcggcgtgcacgccttgtaagagaacttcacatagctttctgattcgacagaaggcaatgactctcacgcccctaaggatcagctggcaaaatagcctcgcagtctcagtgacagtgtcggcgcgcccagaggtaggatctttggggtctttgaatggcgtattccagcaaacaaactccttacggccagagggagatccatcgaaatcgatgagtttcacatcctgcaccccaaagatagacttcatgtgatcctccgggttcgcaacagtagcagagcaagatatgaacttgacatgacgattaccaaccgcagcacatatcctgcgaagacggcgcatgataaaagcgacatgagatccaaataagccgttgtagacgtgcagttcgtcgacaacgacaaatttcagattcttcaaaaatgtgcgccaggaactctcctgtggcaaaattgtaatatgaagcatgtcaggattggtgaaaattatgcgtgcctcgtcacgaatcaagttccggctccccattggcgtgtccccgtcaaaggtttcaaccattgtgtgttgcagcccgctcatatactgaagtagatccatcatgctgcggcgctgatcttgtgccagagctttagtggggaatatatacattcccctgctctccggatctttttctagttcgtgcagcatggggacttggtagatgagggactttccggagctcgtcgacgtcgacacaatcacattgtggccctcatacaggtagttaattgcctctgtttgatgagcatacatttgggtaattccctttgtgttatacagagcattgacaaggtcctgcgagagctggaatgtcaaatctccgtagacagcagactgggcttcgaacacccgatggccttccggcacaatttgtgcatgatacaaatccatctcccgaatttctgcaattatatcctcaatggactttcgctccttgggaattgttgctggcggcttctctgcaagaggggtgggcaggaaagcattcttcttttcttcaagaaaattcactggatcgagattcatatcctcacaatgaaccaaaaacgcattcaaagcgtctgaaaactttgaatttcgtttttcaatcaaagccagcatctgtttttggctgtagacgggcattttcagatcatcgtctctcatttgacgcataggtttcataggttccccagttttcgggttcagaacttcccccttcagatcgccgtccataaactcaaatagcagaacttgctttgtgtcgtctgtatagtgaagatcactgcttctggcatcttcaactctgtccatatctgccgaaaatgccagggtacgcttgtgtaacccatactgagtaatctcttcatctccaacggtcattacttccagcttggcttcgtccacatattcgaaaaggaccgctccgggaattatgaccttcacacgtgcgacatcatcaaccgtgagttctcgcccctgaccaagttgagcttgtactgctttttttatgttctcgaatgtggtggcaaagtgctttcgcgtggagcaaaacgtgtacacgagattcaaggcgcgatgggtttgcgagaggcgcttaaaggcgtctggcaatggcgtagatggagttcgtttcgagggcttcgaggtaactttcttccctttacccgtctttttggcggctgtagttttgagagatccacctgtctgtacatcagattcattggggggaggatcgaccgtggtcgagggtgtctgatcggcagggtcttggggggacgcgttcaagggtaagggcacatcggactcaaggccgccatcgctttcatgacttcgttttcgctttaatgatgagacttccagtggtattgagaaggagcccgccatgtcgaagctccatagtgctttatgttggagctgaagtcgataaaagtcctggttgacgggaaacgcgaaatcacgtgcattgagatcgcctgaaatggcagccgttccacggttctaaaattggccaatgcttaggtctacctcgctcgtttttatatcaccactacccaatccctctgactagcggtgaaatccaaaataattatttttcttgtatggtcctaaggacaaacccgccctcaggctagccctgcctcaatcacgctttctgcaacgcctggataggtgtagatattgaccactctcaatccaacttgggccaggatatctctccaatcagcctccgttctttccctcacagcaaaatgtgccaacatcatcatatccatattggtcgcagcgagtgtaggcttttcttcgttaatcacaatctcgttgaacaagacccgtgaataatccttcttcaaagcaggcacaagattcttcaggatctcgatgccatcttcatcgctccaatcgtggagaatagaatgaagagagtatgcgcgtgcacccttgataggctgcggcgtaaaaaagtcgtgagcttgcacttcaaaagctcgcgccataccatcagctctcacacctgcaatgacaggctctcgatcctggagcacaatcctacccgagcaagggctataatgcgcagcaaaggtagccacatcatggccctttccgccaccaatatcgacgaggagaacgtcgctaatagaagcatcgaaacccgtggttaatcgctcagccacggggtagaagtcatgccaatctggcttgcccgcacggtacgcgctcataaaggagtcgaaatgctcttggtgtggtggtgtttcaagaagccatttaaagaacggaaggttggttttgtgcgcctcttgaaacggaccgtcagttccacccagagtaggggaactatattcggatttcttgaagtattccgggaacccgttaaatgaagggcgtgccacatcgtagcagaaactgatgctggattggtagttctccgctgcgagactgttgctcagctttgtggcatagaaggctccgtcatggaatttcacgaggttcattgctactagatgtcttgttaggcgttttaggagaatattgtcgatctgagtcttctgggaaaaggccgatgggctgagccctgtatctcccgcatccttgaggcattggaaaagcttcacatcgacagcgagacggattatggcgctttgagccggctatcgtaaactccaattagtttggtgaagcaaaataagctcccaacgattttgcagcttctcacctctgcccagaatgtgcgctggatgaactcgcttgggatctccaatgctgtaatcagcgcgcggctttggtcaatcagactttctcttgagcccgcttcgttcttttcaaatgctgcgcgtgaattggcaatcccatctaggattgaggagacagatgggaaggccatgatgatatttggcgttgacagtaagtcaaaagaacagacgctgtctgttaaagaggaaataatgcatgttagaagacctacttgcccctcttcctcccctattcttgtatttttctcccagaaatagtctaaggctagctgctagtacgtggtagacgacacggatgaacttataagccattattcacccgtggaccctccaagtgcggcctttgaccaaccaggtcttagacttctatgggaaatgatatagccattttactactagatcacaacaaaaaccaaggcacggagtacctacctggttatagcgtagtggggccatatctatccttattccaaattgacaacttaccttggcgttggcgggtgctcgttcggagttgaaccgagatagtaataacaggccgttctcacatcactagatccagaaagtatgttgggagctaatcacccatgttaagtcttttcaaaaaactagcctggcgcgaactggcgcctgaaagaatctcacctcctaattatgtacaatcggaacataagctaagaggcgctatgagctaaatcgtttagctcgccgaggggataggtttcacctatacattcagttagggaaatgatctacgtactccgtccggagcaaacagttgagccgtgcctaaagtacttaaaaattagaatttcaggagattatgcctcttagttcacagtaaagatagtccctattacgttcaatccaccatttccctattcctcaacacgtatcaaataaaatctttatgactataaatatgatataaatatgtccaacagaggcagagataataggggtacgcacggtcgccttaacccgccatggagtacggagtactccgtagtagcctcaatggccaacaacaatccactttttacaacttgaataccttcaaggctatgaagtatttgtagaagaaatgtctatatctcctcaagactgttccggatcaccaacagtgatgagtagaatccaagtataagcttcctgccaaaatcatctgtttagtgacgttgatgttgagtaaacttggcacatttgaacagagttttttcctaaagcttgcctccctatttttatttgattcgtcatcgtcgctcatgggcccataagtatattttacatgggtgttcaagatatgaacaagcgcaattatggaatactagtcgatacaccataccggctagtactacaatataggcataggtcaaaaattattcgtgactttcaagattcaaattatttgcacgagtttgtttcccgcacataattgtttcaaactgcctttcagagaaacgcgctgtttgagggtttcttctcgatcgattcctatgcaacgaatgtataatggactaaccctttgaccatggcctccttcaacacaaatgttgatcatagtgaaaaccgagctacgaatatgaatgtcattggttggttcttcaccggcgttgcaatcgcaacagtttccttgaagctatttgcccgaattggtagcaagcggtttggctgggatgatttttttatttttttatcgatggtatggagcactcccagatctccctagacaagactgacattgtggaaattgttatgtaggctctcagcatcattgccatggcactcgtctcttattcggccactcttggtctaggtcggcacactgcaactgtagttgctgaatatggcattgagagatacgaaaaatcagcctactggcagattattggatttcctttcaacattggtatgtttacttactcaatagagaaaatcaagtactaaaaccgagacctataggagcgtttagcttccccaatatctcgattgccatcctgatcgttcagctgcttgaccccaacccacttcgtgcaaatctcttatacgccatggttattttccaggtcatattggccatgatatacgttttcatcgtcttttttcaatgcaaacccaccgaaaaaatgtggaactcttccattgagggcacatgttggagctcggatattttcaacggcttttcgtatttggtcagcgcatatacaactatgacggatattgttttggctattgtaccaatttctgcattctggaaactgcaaatgccgttttcgacaagactgagcgtctgcattatgatgggattgacactgctttccgcggttgttacgattattaaagcaacatatttgaacttatttaccgaccacactgatcctcgttagtggaccaccctagttttgttatctagctaacagctaacatctggtagttttcaaggtggtgccgttggttctttggggagtgtaagtattacccactgtttaccaagcctgtgctaacttgcagcttaggattgagcaaaatgttgtcattgtcgccgcttgtatcccgacactccgccctttattccgcaaggcattcgagtctaccactggatcctctggtgaagccacttcacaaagagaaacgcgctgcggcttcaaactcgcatacagttccatacaatctctctcgaagcggacattatctgtgacggaattacctcttaaggacaggcagcaatcctatgatatcgagagtagtagtagccaatttggcatatggcggacgagagaggtaatggtggaaagtgacgacgataggtctttcgaacgcggcgttggaaggacagataattcatttaggggattgtcacaggaaccttccccccttagctaattcgatcccactactccgtactagtatatgcattctagtttacatggtgaaacaaaacatgcattttgatgagaaaaattcgtataatctacctgattactataggatttagcccttgatggtaaagcggttgataaagcagttgatgataggacaaaagttgacttaatttgttagtggtttacatacaattataatctcccagttgatttatcgataactccaacatgttcgcggggacaggctcaaggaatgatccgatcgatttgaatccaagtcctaaaaccagtcaatcgtgcagtgagaattcgaggccgtcgacaacagtatattcttccacaaaaaccggaataacttcgctagataacgaatctggtagaacacggtatgatgcgtcttcttcttctacagataagagaaatgttgaagttgagtatttaaccttacttccggtcaacagctctatcattgatagtctcttagcttcttttgaagttgaaaatagcccgatatcatcttcgcgtccagtcgatcatattgttaattagcccattgacattaactccattaccacattaggagtcggatcgactggtacctctgggctcaccttctttatcatattcagcgtcgacttcaccctcacttacttcgactgttgtatctataaggatcgaaattccgatcccatctcgaccgccctatgatccgtcagcatgtttatatctagtgtgtattcgacaatgggtaaggatgccactagatgatactgattgtatatgattttgaacctttatatctgatctagaaccttttattctatcagactggtcatatggcgaagagatagtagttatcgcagtttctatcgaagaatatcatctagtcgacggcctggaattttcactgcataattgactggtttcaggacttgggtccaaatcgatcggatcattcttcgaacctattcccgcgaatatcttagagttattaataggatagctaattggtatatgaaccataaaacatagataaactgggagaatatcgaaaagaattaaatagtaaagtagtatgaaagtaattttatatgcattgaaatgtatagaaatcattctgacgtgaattccggcatgttccatcaagtgagtaaacatttttgatggggtggccgccttcgcggaaattgcaggcagaaagctaaccgccattatatatagcatgttgattgggtatgagttatagatagtcttgtctaagcctggtttacagatttatgttatggatgttatggacttatggaatcttatggaattatggattatcttatggattgtaggtacctgatatggggagtttgacataaaagcggtgtaaaaattgaaaggcggtataggcctcgataagcagaatcaggtgccgaggcagaatgtatgcccagttaggaaggcggtatttgaatttcagtcagggcccttattttactacactcatctttatcatcacccaaccaactacaaatctattcttttctgccacaagaaccaaatatgattcggcatccacgctcggcccagcctgaccccataaccgtcgaaatcggccaagtacttgcacccctggctgtctttccatggggaccgcttgcaatgcactacttgggtgttcctattgtaataggtgttagtacggttatcacttattggtattctagcgtctactaatcaagtcttataggttgctatgatcgccgttcgtgatgaggactatcagacagcatgccagaagctaaagcacctgggattctatgaaataattcctgaccgcacgattctccccgagatattggcagcgatcccagatccagatcaagcaattgaagaggttgcgaaggagtatcaacgtctggataactcaactattacgttcgaatatccacccaatcacgacctttctgggagtctacagttgactttggccccaaactccttcacgaatcttcaggtaccggatatgaccggcaacgtgcagcaagaccctgtctctaccacgggctacgacatctacggcaatatatgtcacccacttgaagaggcgttggttgaaagttacgtcaggagcgttattgacgatgagaatgatcagaatgagttttctggttggggagatagactaagcacctgggtggctatgatgtgtggatatcttgaggtcaataacgatatcctcgatagatgctcggataagcgagcagtagaatggtttagtgtgacctacggtcggatacacgaggaaaggttcggtcccttggatagacgtgtctcaaagcgactaggttccggaagggaaatgccagtggatatgaggggcaacctgttgcccacgtaaagtcgggcattttctgtatcatacggtgtggcgaagcagatcaaagcaggtcatttacattttatcaaagtctacacaattagaaagcgttcatgaaatcgtctgttgatgcgaataggccgagataactatagtccggacccaagacctccatatcaaaatgaaatgagagggcctaaaagcaggcaagtagcgctaatgtttgacgtaatgaaaagcgaagaagaagaaagaagaagctcaagtgcaaccgcaaaaaccccatgtctagcaataactgaagtatgtggccgaaatcaggaagggagacattctctagagaaaatgaatattagtaaaattgactttataggaaatgaaaataggttgagtcttaccaattaccgaagactgaattgcatttgatgcttcggcgaaggctgctgtggagacgggggcgttccctcagaaggcttgctaaggcaagttgcaattgcgcgtcttggtcaaaattgagttctggtctgttgggtacacaatatctaaccaaccgcgcaatgtcttcgatatcggtcaaatgctttggaccctgtcgctggtactgggataagatcttctctcgcgtaagccattcagctccgaagatcttcacgggatatccgttgatagtcctggtcacacgtgtcgctcgccgtctgaatattatactgcggcctttgtggtcagctagcgtgatcgaaaacctccaactcgataagctgaatggtgccgcttggggaacgtagtctgaatgccgggatcacatgtccgaattggttgaccggtccaaaatcagcagggaaagcgttcagcaatcgctgtgtaagaagatctgcagttatgtagcgctggtcgacatgaatgactaaatccacatcttctgtccgccggctgggatgtggtgccatgaaacataccgcggcacctcccatgagcgcgtagtcaatttgcaatagatctagacattgggcaatgcgggagacgacggtttctgactggggtagaagtaggccacgcattcttcaatcgttctctaatatcacgatggtcagatttggagtgggagagtgagtgtgatttctcgtacctctgcgtgtgcggagagtcgctgtgggactagaggttttatgagtaaagaaactgatgcaatgagatgtgcgcagagaaaaggtaagagaaaggaagagcagatgagcaaaaaagcaggatatgagaagagcaggggagcggaggagcggaggagcgaagaaactgatctaatgagatgtgcacagagaggaaggtgaagggagatgaagagagagggagagaggaagagcagaagagcaagcccggtgaggagcaggcaggaaggctgcctcaacaactcctcgtctaggtagcgcaacccttccacatatgattttagagaggtcatagtaagagggatgtcaagaatacagcggggctctgaagcaaagtaaattacctccctctcacctctgttatctctcacttcagttacctcttatacttgagaataagtttctaggtatggatactatgatttctatcattctacttgtctaatcaacatgaatctactatcaacttacggatgttgacttctcaactataagagagacagcacgtagctgggtctgtgatattcctgaaggaatttcatttgaggccaaaggatattcaaggtttcttccgatccacttcggcccgcttagaggaactaggtcccggcgctatttcatctactaaagtggggtctaaatcctatgatgtcgagagtagtagtagccagtcaggcatatggcggacgagagaggtaataatggagaggaacgacgatagatgcgttggaaggtcacaattcatttgagatccaaactttctagcgaagactacagagtaaaccacctagaaaaatggagataattaaatttgtatagcccaaaagcttcatgttcatggggtcatcgggcctggttattccgtgctggctgtaaatcgatgcataaaagcggttaaattcaggccaaatttcaggcattaaagccctaacgtaattcacaagcgagtgacgcacacaagcgagtgacgcaccccacccaaaacgcgtctatggtttagcacttagttaattcaaccacccaccatgccaccaattcgctctcgaagctctcgaaattcaatagagcaagaaggcaggatcttgttagctatccaggctattaagggtcaagaaatcagttctattcgtgaggcagcacgccgattcgatgtgcctgaaactacgttacgtcgctgtctccgcggtgttacaaaccgcgcgacttctcgcgctaactcacataaattgacagaaattgaagaggaatctcttcagaaatggattctctctatggattctcgcggttcagccccccggccctcttcggtacgagaaatggcgaatattctcctcgaacactgtggaataaccccagtcctttcagttggcgaaaactaggttataaactttattaaacggtaccctaccctttcctcccgattcttaagacgttataattacaagcgcgcgaaatataaagacctaaggattattagaaagtggtttaatctagtttaaaaaaccattcttcagtatggaatcgatccggacgacgtttataacttcgacgagacaggttttgctataggattaactgtaatagctaaggttataactagaagtaaatactacggtcggagatcacttttataacctagaaatcgcgagtaggtaactgtaattgaatatataaatacagcggggtaggccctccctctgtatattatttttaaaggcaaggtcttctttaaatcatggtttaaagaccttcctagcgactggcgctttaaagttagtctaaataggtagatattagataaaataggcctccgttagctataaaagctctttattctaactacttcttcttatataaaaggggtatatcggcttttagtacttaacggccataaaagctatttaataccaaagttcaataaaatttgcaagtaaaacaacattatactaatttatatactaccgcattccttttaccttttataaccacttaatatcggctgttttatagtattaaagcgggtatacagtcggctagttaaatcaaaaatataggtcgggatcaactatattaataaacttaacttcctcaaagtatacccccttatataaaataaagcttttaaactagagacaattaaaaatagcttcttagcagccggtttagtaccgtttttacccaatcgggtccttttaaagctaaatattcgtcttcgaataccaactccccccccaagccgggatagcgattaggaccctaaaataccttcaaactacattcaattataaaagcaagctttatcaattaaagcattgcttcgtataagatcaagaagccctccgagcccgctcaattcggctattaaccaggttttaaaagcctgccagattactatgcaatctaccgtacttcttgagaaagaagtaagcgatttacgggctactaacgagaagcagaagcaaaagtgtactagatcccagaggcagatacattccgaagaaggcctctccgttcaggaagcttctcaattgattactgcgccggtggaagtagctgaagcacccccccgcgctcagcgaagaaggccttcgctacctttacagccaagaactagggctttaccaacgtgcgggctatgtaaaactcagggccataggagagatacatgtccaaatagatgatgattttagtttattcaatttaatggcgttttggttgggataaatacattcaaaattaataggttgggtagggtgcgtcactcgcttgtgtgcgtcactcgcttgtgaattacgttagttaatacggtgacaacgacccctctcgctatgttatattgtactttacgactagaaatatattccagctacttgtttagagcgtaatatttgcaattcgtcatcaggtaaacataattcaggtttcgcggcatcgggaaacctgcaccaggcatatctcatcagtatatcggtccgagtctgctgtctgggacaactccaagctggagggcgacttggccccttttgtgctatctccaagttgcgagaatccaggctctttggtatggcgtggagtactgctataccttgaacgaggttcttttgaggccgaactaccgacgagtttccggcctaggattctggaaagcaaaggccaaatggaaggaaggcaggcagcaattatgataacgccactttcgagaattgtccaaatcccaagcttgacagaagtccctatcgatattagctgaggttgagcgtggggatcttgcatgacatacaggtcgggtctgtaagagcactttcttggaaaaagatagtcatgcgaagaatactcgcgacggttcccctatcagcagtgtcagaatccctccaagcagaaggtcattgtgaaaactcacaaacttcccagaaggaagacgccggttaaggctactttctggccaattcgggtgtgaagtttccagacatacggcagcggcatcaccaagatcaaaacatcggtcatgatattaggaagcgaaacataacggtagaaagcctcttggttgaagcatgagcctccagcaattgttctatcccatgtgtatgcgattggcgaacattgaaaaatcgccgcgagcaaaactccaagtccatgacctagcacaattgcacccacaatataggcaaatattcgaaacatgcggacaggaaataggcgcacgtagaagaggaggatcgaaaccttagcgggcgctatagtgaaaggaaaatcgaggatttggtttgcgtagagaccctggataaaaccgattagacattgctgagagcttctcaagtcaaattatgacaaactttttgtaagataaccaattttgaaggagttcgcgcgacatattcgaggtgataaccgactcctccccgcttgaccactgtacatcgtgatatcagtatccgatcgccaatatactgtaggaaggtgcgtacaatagatatagagtgccgattgtgctaaactagcaatctgtttttcttgttagcattgtgcaggttcacgaggtttgaatataggtggcgattcataccaacgctgggatcattaaatagtcatcgattccgtttgctactcgctgtatatgcctagtgtaaaaacgggccccgacgataatgatttgaatggcagcaatagcaattgagacaccaatgagttgttgtccgcaatatgcgacagtgccagtactctctgccattgttgatcaagcgttcaacatgtcgcttgcgagtattcaaggcattgcttgaccaattggctaggtcgaatttttttcacgagaaaacgtagaactcacacttaccccagagcaaaatgaatcggccaatataagttgccttgcttactttttggtcatatacttggcctcgagttagtgggttgattagggatttatattaaggtgtcatcataatgattggggccaaaacaggttacgtattgatttttagaactgtaacaaattaacaatcctgctaagcgagatgcgctctttgaattttgggagagtgatatatgctttgccctttgactctaccatcacaaatcttgaaagcacttttgatttcacaatggcattcgcatcggacggcgtgttgaggagaacccatcgcgctatcgagagcctagaacacggctacccaacacttccactatgtttaggtttcaactattcctatcacatcgttaattatgctattgtgctccatattgctaacaatgctgcttctaagaggccgagcactcgaaatcctttacaacatatcttccaactccaccgtgaaacctgattgaaacctgccgaaggaaattcaagcgtaactcgacaataaccagactggctagttagagcctctttatcagagttttctatagacggcagtatattgtaggcaataaatgcaaattcaatttctcgtataaagcaatcggggcataaaataatcccagatctcggccacactagttcatcgagtggacctgcttgcttgagcacggttcacacggttcacacaacgggatctcaaggcccatatttgtcggagagcccgccccgtgtacggagtatgtagcgtttatgtactccacgggataacttgaatgctctaagatatcctttcgggaaattctagaatttctacgacaccgcaagaaaatccatcatgacccaggatatggacacatctctctcggcacagatcgctgctttggccgatagcgcgcagactcgaggcctcgatgagcaagcacgttcagaagcactcaatgctgctcggcgtttggtagctgctttggagtcacccgttgagagaattattcaggatgtagtgatggtatgttttatgtccgagacttcaattcacagcccctcattgcagtcttacgatgtggcttttgaattaactaattctgaatttacagcactccccagctttgatggctattcgtatgggtgttcagctgggaatttttactcagatcagccaaaagccagaaggcggcgcttcatctccggagatcgcagagaactccggtgcaagcttggttcttgttggtaagattggcctatccgaccgtcgtttatcaatgaattccgccattcccctacattaacataaaattatcatattcagcatgaaattatacttgcaatagactaaatatctaatataaattctctcaagaccagattactcggcttctcgccgcgacgggatatatcaagcaggatggagtacaacacttcaagccctcgtctcttaccatggtgatggcagacccagtcatggaagcaaccactcgagcctggtcagtgcaatttttgatttttttcccatctatgctcctaatcggctgaagcttttattgacaacacgtagctttgagatcggcaacctttgcacttccaaagcaccagagttcttccgcaaaaacaataatcaattccctagttctgccaaggacacgcctttccaactaggatttaacaccgatatgaactatttcgagtggctgggccacaatcccgatctggccaaggatttccagcaatggatgacactaaagcagaagactaccattaactgggttgactggtttgacattcagcgatcaatcattgatggctccagtggcaagcctgaggatgtccttctcgttgatgttggaggtggcgaagggcattatctacggcaattccgcgagaaattccccgagacacctggccgtttgatcctacaagatctgccgcaggtagtttcgaccgttgagaatctcccggaaggtatagaattgacgccgcacgactttttcactcctcaaacagtcaagggtgtgtaatgctagaattgcatagttatcgtgcttgtgctaatgattgtcaaataggcgcgcgggcatacttcatgcactggattcttcatgactggtcggacgagcactgccgatccatcctggctaatattgtcgatgctatggagcctggttactctcgtctgatcatccacgagtccatcctcccggacctccactgcgatctgccgtctgcttgtctgagcgttatgatgatggtccaggttgctgcgtttgagcgatctgagaaacaatggagggatcttcttgcgtctgtgggactgacgaaagtcaccttctaccagcctcctggaagtggcgaaggtattgttgaggcttttaaatgatttagggggtatgaggcctggtattggctcaaaccggggtgacaggggtgacagtcaggagtaggtttcctctcacttgactgatttaggtataagggagtgggtgagggggaaaagagaacgtagggacaaactgagtgagaaatgaaggcgaggagtgagccaatagctgcagcgctctcaccctaaagtgatcttatacttttattaatccctgggagtgctagaagacttgatccaggatataaatactttaaaatagatggccataagtggcgccattttcagccgcctatctgccacttgctgtcgctcaccgtgccccctgcactcacgcacggtgaatttaacacgccgcagtagcttcgtatacacccgtcgccagattatctctcgtcacgagctggagaagagcatcaaagacgctcaacatcacccaacaaccactggacatgacgataagacattcggccttgatcctgggattgtcgatgacccgcttggaaggtttccgcaaacatcagaccacgttcatagtgctggactcccatcaacccctgtggaccatccaaaccgccataatcgtcttgggcagtgaagaccggagcgtattgcaagtcggacgtgtcaatagtaatgggagtggtgggacgagtctggaaacccagctcgccattccaggtcatgttctggatcgccagcaacgttccattcgtgatgatcagatagtcccaatctccattcgagatcaagacccgattagtcgcctcgatcagtcgcggcaggacatgctctgtgggattcgcagactcgtcgtactgttgctcgggccccgggttgacgcccacaaagacgctttcgatgctacagagctcccagtcgatatcgagaggaacatgcagagcgctcttcacatccgtgcggttgaaataggttgagggaccgggttgataggcaaggtctgtggggaagcccaggacatcccataagagtggacatgtctggctgaccttgtaaggactccaacatgggttcggattataagcttcgaaataaatcatgttgtagatgtcgcactcggagtagttcatttgtttggagggttgcactccagaggccggataggtgaaatactcctcgaagtattccttgtaaccgcattcttcgtaggtagcttgcagctcccccatgtacgattggttaaagttgaagagctcggcatgttgttcaacgaaggggtaggaggggagttcggcctggatataatcccactggccgatgcacgcatcatacatcagggctcctagtatgggatgagtatgtgcgaccgatataatgcagattcagggggattctcaagtcttaccgctgaggttgaagtactcggtatcattcttgtcgagcatggcggcggatatgaagggcacgtaccggcccgcataactctcaccagttaagaagattcgaaagttcttaataccgtatgttttttggaactcttggaaaaagttgacgaaatcggcagcgatgtcctcctcgtcggttgcagtcggcgtgccgtttgagaacccaactccaaccggttggtcgaccctaaacacctgtcagcttatcaagtacatcctcgggtctgcacacaaagaaaccattttactaatgacgtaccataacatattggttaaattaacccatgagtactcattgatgacaggttcgtaggtaccaggttgccaggtgaagcgcccgttctcctgcagaaacccctgcattgaactacatcccggtccaccattcagccaaattgtaaggtcgtcgcttggttccccgatcttcggctggaatatgtagaacaaggaggcatcgtcacggacagggataaaccccgagtacatctctcccaaatcgaaattaacgtccggtagactctccacgacatgggctgtggaaacattatttgtcagccgtggttgaaggaatgggtaaaggattggagtaaagcatacatttagtctcgttagttaaaaatcgatagtttgagggatcaattggttcagactgctgggtaggacgcgtagaagggcctcgagtcggctgtcgtgcttcgttgccattgatcagcagtgcgatcgccagaactgctgagatcgatcgaccgaacatccttgcagttcccttatacggagtagagatcgagtgttcgcaatgcaaaatgtcaatcggcccacttgggtagagctaaggagaggctatgtactcttatacccctatatgccggcttctctcgtgtttgcatgacaaacacgctttggtatttcttccgagatccttcgatatgagatccacttttcaagggatcagccgtgctaataaaattagcggctgttgatcacgaacagaccctcttttgcccacttctctccactttttgcattttaggtaagtgtcgtccggaaatgagattcttaatgggtattagcatcaaacgctagaataccaatgattcattgtggtatatactaagtctcgtagcacatctagttctaatgtattaggaacattgttatgtattcgagtgtacatatactacagcataagccaattaccatattgtattagataaattgttaataaccctaagcttaaacaagcaatcaagcaaaagccaattcgcgtataaatggattaattaccttttatgcaatattattggtcaatgaaagcggttcccctgttccttctccatatctgacccacctgtgttttgaacccggggattaacttacggggtttaacttacagatccccggcagttctttcccaatttaccaagggaatgagtctactatgtaactactaaagcgatataggtgcacgaaatcagtagttgggaatgacattggtacctagacagctacaccactatatagctacagtacttcttccttgtatccgcggagatggctacaaacaggcgaccgggggccggcggaagcgcagtgccttgcatatcgaataatactaccgtatgtattagaatacaacagtctatacgaagagatctaatcagattgtttagcttataattagcatagtacttggctaattcggtttttgttacatattgaaagcaagttaatgtttcgaaagcgttctcacctcgcaatggatacatcgtaggaccgagaaataacttctaacttagcatctagattgcgtaccatgaagttgtataatacagaagagaatattcgagcaactccacataacacgaaacagaggttcaaccgtaggacgaagcttaattagggaatattcggtagatctctgcgctactggaaatgaattccacacgcgtacgcaggacacagactattgtatggaccttgggggaacaacttggaataggtccactattattaatgctttgctaatcgattccaagccttggaaattccaaagtagacgtttaatatttattggtaccttaaaacctgattatgatattgatgcggcatatacggagtacggagtacggaatgctaattttccatctgggcatctttaagcgggccgttgtcggatctgataaaaagagaggggcaaccatgcttcatatagtgcacaaagactttagcatagtactccgtacatatcatcgatgttcagaagccccttttttcataactaatttaaaacccgactgattgcattctatgccctactgccactgataccagttccatggtataccttagcagtttcgacactcattttgcagtatctttaataggggcgagctgaggagtgtattagggttatctttgagctgaatccacgtgactgaatgtcagctttctatccatgattcatacagagtgtccgtgctttgtacaacatacttggattcagcatattctccgtatagatgaaacttgcggccccggagttgcccgcggccgaggtttcggggcttcgggtcggagcaagggtatttaccagatataaagtgacaagtggtagtagaaggcgaggtgcgttatagagcttatggttatcacggggtctgaagatgcttaattaacttgttcattataatgagagtgctgctctggtataaggattaaagaggtgccaagatataggcaaagaaatttgcaaagtctaagtgtgtgtattaaagatcgctaacaaccggtaaagaaaattctgcactgcctccacgagggtggttatttttcattttttatgggtcttctttatttacatggaattatatttcgatgactacccaggtgaactcagcattcaagacatcaaacagttcctgtcagcttttcgctaagttgtgttgattcattagcgttataattaatttcttcaaatccgagaaagaagagaagacttaatcaaagtaataggccgataaccttgttgtcttcttcaacagacaagaaccgaatggtcataacccaggtatattcaagactaaatcgggcgttggagactaagagcaatctgcatgtttgttcttctccgagccaccatcatgatgttcctgagttgtataattgatttactacaacataagctgtgcgtggaaattcagctctaaagcgattagtttccaacaggcagtgaagccgaggaagccacgtaacccgattcttcatagtgagctctatcaccctcctgttctccaccttttattcgcccttgttagttcttctctccattgctgctctaaaacaagagggggccaaatgagagtcgaatgatagtagatcggagagctcttgcccaggatcagcaacggctgtccgaaacgaaatttcacctgttggcttagggagagaatgagacgaaggcgggttagcaatttcggtcctgggtgggagctgtgcaaccattatgccagtgctagtgctacatggtggcaagcgggaagcgttgtatacttgctgtcgaaacattatgaagtcattcgttttgggcatggttcataatttctgtaccttgggcgaaagatctgagtttcctccaaaaaggaattcgcaaacacaaatcacctaggtacgtcctacggcttggatctgaacgatatcccgggaaccatcttcgatcttgaggctgatatctcgtttgctcgctcatagcaactcaacttttgatggttgtgagtaagcgggtgaagagaagcataactagttaaaataaagtgagggccaagtgaaagtgtttgaggtcacgtggcctctcgggcatgcttgaattggggactgctttcgccgtgaccgccttcgggcaggacattcatagaaaaagacatcttaaggaatagccgtctgatcatccctccctgaccccatatctcggtaagacggctacaagcacctaccggaggatctgcgtcttcattttgtttccatcggatttgagagaacttccatctcggacttcgctgagacttgaggacatacagattcctcctgcccgttagaatagttccaagtagagcattcaaatgtctacaagagtgctgaccctactggtaggtgtgggtcagacttcggtctgtcagatttggtgaccgacgctgggatttcctgaccctaggagagaccctgatcctctgtgaaagaggaactcattgccaaacagcgcgatatcatctttgaatggacagataatcatcgtctcgtccaacgagtccctcgaaaccgctgcagctggaagacatctggcacctagctgctcagcattgtgctcggcggatattgcccatctggcagatactgcatacttcagcgaggtacggcaggagctccatgggaccgtgattgccgattcgagcgcgccttcccctcagtcaacactctcaacaagtacgaccggtagtttctcttctcctcctcaggcaaatcgatattttccagagcacacgcattcttcacgcagtactcttcggatgtctccaatacaactacatcgcaggcaaaacaaccccagctttagtggttgccgaccagccagcctgttgcatagtcgatcgctgtgatgatctaacgattgccgttcagagtgggcggcatccgcctgttcggacgatggggaattgatctcatcggccgcttaccgaccactccgaacggcaatcgttagatcaccacggcgatcgactatgcaacaggctggccggtcgcccgtgcagtcccggacgcaacagaagaggttctcacggaatttctttaccgcgatgtctacgcacattacagagccttcaacgaattgctctccgataatggcccgaacctcttgtccggcgcagtacgacactttgcgggcttgctgaaagctcgccaccgtacaaccactccatataatccccgcactaatgggaaagtagaaaatttcaatggtttaatcggtcgcacgctcacgaaataccttatgggggaacccacgcgcgtgtgggacgagttcctcacgaaagcagcgcaatttatttcaatatttgagtgtaagaaggaaggagcccgggaagaatggtatagcgatttcgccaagcgagctcaaactgaggacgtgggtcatcctgttgattggctgcggactttatacacgaggatcagtgtgcaatatatggtattcgaaatggaagatctttaggtaactgcagataagatggaaaaagaccgggtggctgcagaacagttgggagaggagaggccaaaagccgttgtcccaccgtctatctttgatgtaccctgggctatgggccgttaaacagtggactagttgatatagtctggctattgatactcgttgagattgtttctgcctcagataggaggacttcgctccctgactgtttgatcttcctagcagttagctcgatacaacccacggttttctttgcctgaggttttataccagtggagcttgaaacccggtagtgagacaggtcaaaatttactgtaggaaaatccgatatggtgcactgaaggtgtattaagaattcactaatctgcagtaataagaagtcagagccgaccccataagagtccgtcttcttcttcttcttttttttttttgagttttcttcatttacaagcgtatcttcatgaataaattccaatgtcacagctcaaatctcctcaatgacatccttcagtacatcgaaaagctcaccggcctgcttctcattaccgagctataggatcattcaatgttagtattataatcatcaaatcagaaaactgagaaaaatcgaggaagataagacttacccggagaagatggctcacaaccttgtcatcttcattgctggcgagatagatatcccgagtggatgggcgaaaacccttgatatcaccaaaaggcatggtcttccaaattgcactgttcatcataacacgcaaggcaccatcggcgcgcatgataacgcggccggatttctttccatcgggctccgtcttgaggttaaccttgaaggtgccggtaccacgctccttccatttcttgtcatcaaagtagtacagcttgcccttggctgtaaactcggtggtctcattttcttcgccggtttcaactttgtcatggggtgagcgactgtccatcttcggggtgctggggggcaaggggggatccataccagtttgtgcgtggaatcgctcgtcggtcttctcggcgacaaaggtgtcatcgggtccgcccgctggttccttgtcactttcttccttgtcgggttgttttgcaccgagggtcttttcactgggctcgccaaaagaaacgggggcattaggagacgcgaaactggtgagtttaccagccgttccaagaaaaccgacgggagcgtttgccgatgcgaaactggtgagattaccagctgttccagagaaactggcaggggcgtttgcagatgcgaaactggtcaatttaccagctgtcccagggaaagcggcgggggcattgggagatgcgaaactggtgagtttaccagagggagcagggaaagcgctgccaaatgcagagaagccggatccgagggcaccgaaaccagcagttgaggcaggaccggttgaagcatcagatggtttatttgcaggcattgcaaagggtgaaggtgaggtagcagcctttccgaatgcactcgtagtgaaagtctgttaggaactagtgttagtggaagacgaagaaaagaaaaacttgcggaagatgaggtagccaactcacctggtccaccttggccttgcgctcctccgaattgtcacgaggtctcttcttctcgggttgtccttcggtgatggatttttcgtctgatgaagttgtctcagtcaagccaggcgtggggtcagtcgcagcgtgggaattctgtgagacgtcatcttcaagttgttctcggctccgtttcttcttgagggtttgtgaagaatcatcctcgtttccgccggcggtcgattcaagattctgtgggaattgagagtggttagaatcaggaagtccaagcgtgggtctagggtaataggggtgcgttggactgtatgggacaggacgcggagagggagagggtgagggtgaacggtagtcaggtagagagggcgagggagaagagtagtcaggcagagagtcttcatctccaattgactcggggttttgagttgtgtgagatggagaatcatcatgtatgtaggattcagatgaagggtgggaagggttctcgagagaagggtgcacaatagagggcgacccaggggaagggtgtccgggggaagggtgtccgggggaaggttgtccgggggaagggtgtccgggggcagggtgtccgggggaagggtgtccaggggcagggtgtccagggaaagggcttccagatgaaggaataggctttgcagaaggaatggtgtcacggatttcggaggattcgccttcagcggatctcgaagtcgaggaagccaaggtgaccgctccagttgtcaccttgataccaacctcaacaggaatggtcaaatggctaacttgctcggatccgccaaatgagaccttgatctcaagctccaagggaaattggatcttggtctcggtgatgaggctcatgatcgggttgtgggacaagggtgtattgcgaaccgcaatgttcgcggatgatgtggccagcacatcgtcactcacatcttgggtagtggcatccttgggtaattcggcgtgattggagttgtcttcactgtcagcggtgttcggagtacactctcgggatcgcttggctgggggtgtgtcgtttgcaccatctgtgttgtcgaggtagcgctttcggtttgcacgtgcagaatcgttgtttccaccaacagcatcgaggttagtctccttgagctgctgtcgcacggggcgttcgccgctatcattgtcggaggggggcgactgcgcggtcactatcaagattgtcagatcacatgaacttcggagaaagccctacggcagaaagggtattgcagatataagtaaaagctgcagaacggagcaaagaccgatcgattaaaacgtacctctgtggtccattttcagttgctccgtttccaaagctttggaggttgtcagcgaaactgcccaagtatgtgggggaggctatgcgcccaagcgctgatcacataccacctgtggagaagttctgctcgctagaagcagaagccatggcgtcacgtcctatagacaagcttgtcaaggatattggtattggattccagatatccggtcgagattgagttgggcggagcttaaaccaggtcacgataactgcagataaccggttcggatcgattgggaccagccgaatcgacgaaggatggaagatttgaagtttgcgaactttgcgaacagaagaacgagaggatggaagggtggaaaggtgagagaagaaggaaaatctagcttgccggttcttataagttgaccgccgggtgcggggcccaacaaacgggttctctgaatagcaaagcgtcaatggaaatggaaacaaagcatattcatctaaatagacaattgtctattgttgcctggtgcctgggcagatacaattcgcataaattcaattcagagtctggatataccggtatccgcgctattctaatacaattcaatgttattattgaggttgcgccgatgcctatcagaggcatgtgacggcgcattgtctcaactcccaagcacaatatcacaatagagagccttaactgatgaaacagagacacccgatcgcaatgtagaacacaaacagcgggtacactgcgatgccgactcggttccgcaccactcccgagcctcccaagatgcttactccggctgctaaagaccatgcgactaatacaagatatactggtatccgtgcaatggtaggaagtcctaacgcactcagcatcgcggcgatgaccaaggggaagagcgtatatccgataatgcaaatcgactggaaaaaggaactaacacgcccaggccgcaatgttagtagactgcgatgttgggagatgattcgtagaaaacttacatcttgccaccaagaagcttgatctgaagagtcacagcagcttctccgatccagacaagacagaaaacgcccgagaaaaccaccgacgactgatcaccctttgcgacggacaagaacaaactcaggaccaggcaaaagacaagcggtcccctagagtacttattagtatttttcagacttcccgtgtgtaaattcgcttaccagagatcccagtcccgcaacccatcgctcatgccaccctgcaggaccacgtcggcatccggccagcgtccaacgagtccccgaatgttaccaccaaatccagacactccaccttgctcggaatcagcggtaccactgcccccgcgctgcatcattcctccgagcaagtacttcggccaaagcacctggcgcatcttctcccacacggcaaccaagtcgcgtgacaatgtctcccaaacactctcatcgatggtattttgcactgcacggcgatcctcaccaccgatagaggacgttagatagttgccatagccagaggaattgcctcggttggccgagctggattcgatgttgcctcgcagaggggccgtgtcggaggtattgtgcagggggtcgtcagcgtcgatggctagaatcacaccgaattaggatcttgcggatacagtggtaatcaagagggcaaagaaaaatactcaccatcatcggcttcgatcaaatcatcaccaaggagagactcgtcatcatggggctcatcatggggatggccttggtatacggtagccatggttcgcgtggtatggtcgtgatggtcggaagtttaccgcaagaatggcacttcctttagttttagtcctctcagaggcgaagtcaacaggaaaggtcaaggtaatcggggagtatgaaagcaagttagccaagctgtcccggaaaggctagagtggcattacgtactgggtcacgggtaatgttaccaggcacgttatgtttcagcttttacttctacgatgcacttgcatgcatattatgggctttctgatttgaatgtttcaactgccttgaatctccaaaaataaaatgatcatccgatgtcattaatttgacaatcaattttcctcggtatcagcaacataaggcgcctcctcctgatacacatcgtacttgtacttgcttccgatatggtcagccctgagctctttctgtcccttgccatatatcctctcacgggctgtgagagctggctctgaggggtctggaagttcaggataaagaccgcgccgcctcagctccgggatgagcaggtcaaccacatcctcaaaggtgccaggcgtggtaacatatgcaagattgaacccatcgaggtcagcctcttgtatccaacgctccatctcatcggcaacagtagccgggcttccaatagctaccgggccgagaccaccgattgcagccttctcggcaaccacgcgaggcgtccagcgtggaatatccttgctagtcgtggtcaatgcgtcaagcaagctagtgactttgtttgcctccaacgagtctaaagccgtgatgtcttggtccaatgggattttggaaatgtcaatgcccgtccatccgctgaaaagaaccagtcctccaatcaccgacgcgtatttcttcagctcctcgtacttcgcccacgcctcttcgtcggtcttgcctacaatgggcgtaaaggtaccgaagaacttgattgactgtggatcacggcctcgttctgcggctagcttgcggatgttgtcgaccttcggcctcaacacctctggcgaatgggaagagacaaagatcgcctcagcgtgtgtcgaagcaaaatccgatcctgcaggtgaagtccctgcctggaaaaggaacggcgtccgctgcggagacgggtcgacgatgtgtcgtgtgcttaatgagaagtacttgcccttgtgattgatctgacggaccttatccgggtctatgtacgagtctgtttcggggttgggcgacagtgcatcaggagcccaggaactttcccacagtctataagcaacaaccgccgagtcagtcttccacggcatcactaaccaagcttttgacatgcaactcacttatagagcaccttcaaatactcatctgcctggcgataccgttcgtcatgctcaattggagtatccacaccaatggctttgaaagccgctttcttatatgaggtcacgatgttccaacccaatcgaccattggtcaaatggtccagggttgaaaagcgcttagccagcaaaaagggctgctcgaatgaagttgaggccgtgatgccaaacgccagattctttgtcactgcagccattgctgaaatgggctaaccagaagtcagagtctgatcggaatatttggtttattgatactcacaatagtcgggtctgtcaccggccattgcgccgcacgccgaatacactcgtctagtttgccctcataggtatcatgacctccagttgtatctgccaggaacaatgcattgattccgccgcgctccaagagtttcgccaactctatccagtacccgagagttcgcttggtcgcagacttgtccttgggattctatggagctgtcagcattccggcccttcaccttcgattcctataccaaccttccattgtccaggcgacagatgtcccacggtcgacatatcaaaagcgttaagcaagatttgtttcttgccattgccaacggccgagccattctggctagcagttgcactgtcacccatgattcgtagttttcaaggtgaaatatgcttcctttctttcctacgggcagtacttgctcgcgcaagttcgaagcggatcggacgatggtctataagagtgagacgacccctcatgttccaaaccaacaaagcccggaaggacggctctgtccaggggtactacccccaccatcctaacacagaattcgcccatcgacgacgtatctcgcgccatcgacaatgcaaaagaggggaacggcaagcctccgagccctaacaggttggattcttagagctgcatatggcgtgccgtagaccagaacattcgccatcatctccacattaatcacattatcttgtagatatctttaacctccgaatgataatgccggcataagtcatgagagcctatcggaccatttttctcagcgcgatatcagtattaaggacaaaggatagcacgttagagggaagaatttcatcatcggctgtcagattgcgtgacattttcctcgtcaacacccgacttcgcagattattacatattatgttccatttcaaccttgggactggtctttgttatctaaattaagggatagaaatgaccggataatagccggaacgatgatattcgaatgtcgtatgacttagcagtttatataggggagtgtaaaaggctcggcggttttctggtgaaaaggtccgttggtagtagacctacctaccttagtattggccggagaatatatttcaattcttcgtttctcattgggggcttatccaatatcggtatgtctttcattattacacttaatctattcctagccatgatcttctgtaggcttcttaccaaagtcaaggcgactggcataacgaagactcaaggacaaggatcattacaagttgacagcaatatcaaacccctgtggaatcttgattatcgtctcatgttagaagtagagaatgtacccatggtattatgtacaataatgcaaatatgcaacgccatctatatcccccaatgtgtgatatacaaacataatacaatcgaggcctcagcctcgtcctgtcaaaggccacaaatataatcgtgcttctcacaaggaaggttcctcttgcgagtccgcactttcttgctctcgagagttgcgagcctcccactggaattttttgatgcgttcccgggcctcctccttctgctgaatcgtcgggtatactttcttcctcttccaagccgcaatgacgtccttgtcggaatacttcttcagcatcttcgagtcggcgtcaagggccttgcgctcggccttcgaaacataaggcttgtagtcaaggttcagggtgtcgtcaaccaccaaacgaacccgcgacatgatcttcacagccgccggcccggcgacggaatccgaaagcgtgttctggagggcactccagcgagtcttcgactcgggttttccattctccattgcctcgtgcagttggagaatatatggccgtaacgtggcgatagcagctagtctcagcttcgcttgtagctttctgcccatctcatgtagtttgggggctttggtggatttggagtcttctgtgtcgagtcctctgaggtgcaggagaacggacgagttggcggaaaggatctggatcgtttccagatagccctcgaggacgcgaatgtcaggtaggatcaatgctttgtccatcaaaccgaccagctcgttcgcatgttggagaactgagtggttgcggcgatcacggcggcagacactgagagcgacgtggaatgctgttccggttgcttggcccgagggaaccatctgctcccgcatggttttcacactgattttgctggagcgagagatgcggaggaggcggaaatattggatgtaggtgaaggtatcggggtcaatgcggtaatcgtggtcctccaaagtcatatgtttccagtaggcctgtccaccctcagatccttgagtcatggtgaagcatgcgtttaggataagcgtcaattccttgctgtcgggtttaaggaatgatagctcctccgcctggggaacaacaggtttgaagagttctgagaagtcttcctcttcctcctcttcctcctcttgcacttcttcctccgccttctcctcctccacttcttccaatgcttccatcaactcttgttcaacctccacggccgatttgaaattttcgattggtcgattgttctcgtctacgaacggaacatcttccaattctgattgccgcgtagcctctgagacttcaagggcttgagtttgctcgggagttatcctgcgacgggtcgtcttctcgttctcaataggtcgtttttgcagtatagggatccccatggtttgcttgtacaattccatgacattgtaacaatcaatatcactaccgccttccagaagcaagctggccatgccgttaacaagttcattgtcaatttccaaggttcggttcttccaccgccagatgacatcggcccaaatccgcttgccttcagtaataacctgggccttccgttcaagaatctgctcaatctcatcaggagaccttttctgtatatctctgcgagctgcgaattggacagcgttcaagatgatggtgtaggtggtagcatccggggcacctgggccctcttcgggtaattcaccggcaattttccacaggcgatccatatcccaatgacgatggcagactgtaagcatagcgttggtgtgtatgatatcaagcttgactccagagttcggcgagccaatcgagcggtagacagaggcggcagttttggcaacacccaatgacctcggggctgcgctgaagcccttcaacatgattgtgtatgttcggggagttggtctcctgccacgttttttcatctatgagagaaagtctgtcagaatacaagtccgaacctcaatctcgggcaccaccgaacaaaactcacatcattgtaaaacttgaacgcagcctgcgggtgattttgatccatgcaatattgcagcagatgattccaggcaacatcacatctcaagccctgctttgttccagcacgaaccaaggccgccgccagggccggattaccactgtgcaaaatgcgcgcgacccgatccgccattttgcgagggtcgttcaaccatttcaactcctcgttgataatcttgggtgtgagcttgggcattcctctaggcgggccacgataagtgtcctcgggagcctcgccatcggcctcaatgtcggcctcaatgtcggcctcaccatcttgttcttcggatgccttgtcatcagaggcgcgattctcccgaacctcgccttcatcatctccataatcatacggatcattctccaattcctcgcgttcggcagtctctggatccagagccttgctttcggaagtttcgagctcactgttgtaccgcccggtaaacgaacccgacgcaatagccatcaacatgtcatgctcctccctagacttgacatcctgaaccacccgcctgttatcatgccgacttttaaaatgtttatcgccaacatgtcctatgcggcgagtatcgcgatctctatcggaggagcggttgggataggaggaggagttatagcggcggtagttactggacgcgatccatgtctgtggcagtcgttgggatgcagtagtagcacggtattgctgtgcggtgagcagtcggctgcgcaaagctctgttcacgagcgaccccggaaaccgaaatgtcatgaccgggttactgatctccaggtggaaagcttgtgtcctgcacaatgctataagggagacacggattcaacaggagcgaaatggcaaaatggaaaacacgaagaacagattgttatttcctcatcgcgtgttggagatggtccgctaaacaatttcgcagattatccggccgctagttcatatcgggtctaggcttaatgtctgtatattcaggcatcaattattcctgcctaaggtgtcattcaaccattgatacctcaggtttcttcgaggtccaactagactgcaagtggtttagttcccattccttcaacccatgttccctgcgggcctcgacgggagcgctagagcacatttcccagagtcttctgtgcgtttaaggacttgactagtttactagttcccttggatcggcgttaacatctggacttagcacatgcgctgatccgtggatgaagatatacttccctaccttaaatcaacctatgaagtggacgtaaagcttcatagcactatcacattctctctctcattcattttctattattggatcctcccatccgacgctaccgagccttcattccaagtatacatacatcatcgaacatgatctgaaaatcaaacaccatattcatagtatacccatgcacatcactcactacatcctacccagccatcctcctaagttctaacccaaccggaccataataaacacgacatgcacagcctacctacttgaagtatcacacgacactagtcagaagctaaaaacaacctaactagtggagtccaacagaaacagactacataagcactagccaagtaactaagcaatgtgacatgttaactaactagcacgcggctaggcaggaagaagaagtaagctagaaacgactaggaataactctaaaagcaaaattaccaccagtctcccccacgatgatatcggtggctgatactaacgtccaacacgtggagacgctttactgtagtaagttagttagttagttcctagcttcgtgtcctgtgtatgatgtatgatgtatgtatgttgtacaggccacatatacttgtcttattcggttctagtcaggtaaggtactgtgcgcatgtgtacatatgcagtagttgccagtgcgtacgcacatcaaacggctttgcatggtattgtgctcggtccacggtaagtgccggtactgcttagtgctgatttgggttaggcgtagattgccccgggatgcttgcagtggttcgttattgccaggagtgatttattttgtgtataatactgaggcctgtttgattctctcggctatatgtgcctttttcttataccagtaatgcttttgtttttttttctattttttctcttgcatcatgactatactagcctgcatttgacatttgaactagttagttactaaaaatgtgacatcctttacataaacaattttgagcatcaagacagcgagaatagtgacatttaagctgattgcaaaatgcactagagaggggaaaggacaaaaataaataatacacatcaggttggatgagtccgtggagcataatgtacgttataaaacgaaattgaagaaaaagagagaggagtgaagcgaacacttgcatgtagcaaggttaacacggataagagggaacgggaaacaagactagaacaaagaaccccaggaaaacgattttgggagaatgctgtcgataataaacagatgcaaataatccgccgcccaacccatcgttggagccacgacccaggtaaacgggcaaacaagataagacatacaccacttccgcatcagatttcaagtaggaaatagaacatagagagggtacaaaagggcgccaagccctctcggctcgatgcactctaacacaaaaaggatgacaggtatagaacaaagctggaaaagccactcttagacagatcgggaataaaagccgcagaggttggtatcatagcacgaaagactcgggagcggaagaatggggggtgttgggaatgggaatcggaatccaggacgagaacattagtcaaggacaggggatatcgtgataagaaagaaaaagcaaatgcatttccgtccgtgtaggtccatagcggaagaggtgattatgtgggaaatattattgcggatagtgggcggattgagtctctggaagctgtagcgaatttatggatctgtggacaggacaggtcgaggatgacctagtccagagggtcgatcctggtataaagaaatggcaacgacattactcacgttgcgggtaccccggtccgctctggtagggagagtgagggtagttgggagggtaggctatctgtgcattactctgatagaccataccgctgccaggaggaccaccgtactggccggggacctggctgtctgcgggctggtacccgatcggagggagttgagggcgaactccaccagcgtaaggaggcggctgtccgtgggatgggtcagaggggttcggaggttcgacctggttggcctgggcggcctggacggcagcacgctcacgctcctcgatagccttgcgctgagcatcttcctccttcttgcgagccttccactccttgcggatttccttgaattctaagagagcaaagtcagcagtgagcttaataatgatcagtttccaaaatgggaaatagcgtggacgatgctggctagtgccgggacggaaagggataagaggcaagcttagcctccacgccgtcggccacgctactgcgggccccgcgacacctagtgtaactcactagcgtccgacggcgggcgctaacccgatctagccatttgcgacaagattcaagatctccgtcgcattgaccagcaaaagtctaaaagcaaagaaaaaatgacatgaacttaccctcaggagtacgcttggcgccatgcgattgcatagtcacgtgtgcattcaaatggtttagagtaccatatgccttttcacatccgttccatccacacttatacatgcgctcaatttcctcgtaacgacgacgagggcgcttatgctgctgtgcgccagggattgggacaaaagaatagacctagagtaaaacttcgaatcagctctgatcaaattcaaattccaagccacccaatcttatccccagaaggaagcggttgaggggtagagcacgcggtttttgacgatccctatgacggcggttcatggaccgcatagtcaaaactcagagggcatccaagacaacaatggttgaacaatgtgacaaggcttcagaaatccccccgggaatcatcaaaaacatacctttggagagcgcggccccttgagtacaccaacaggagaggtggaaccaaccgttgtggccggggaagcataaggtcccggcaatccatgatgctgttgtccatagctatgaggccaatccggacgtgcgtacatatgctgaggcggaggtgggtgaccctggtactgcgccatctcatgcccctgaggttgataaggagagtagggaggaggataggtggggctgttggccggaagcgaaggatctataggaacgggcgcgtcagactttgagtgcggactgcgcgggcccgtaggcaaggtgttggtgaacggacttgttgcttgagccatacctggcgcaccgccgggttgggagttgggggcgtaggactgaggaggccggtgaaggtaatcctggtagccaggcgagcgggcggtgggcggagggttcagaccgtagtccgactgaggggtgttggccgacgaaatattggcgggtcgaacctcaggctgcggtgtatactgcggcgtggggcgggcctcgggttgcggggtgtagtgagcagcagcagcagaagtttgttctgcgggtttttgttcagaaggtgcgtcggtgacggcgtttgggtggtgcgaacctggctgtgcgtactcggaagcgggccggttgtccataaaagagaggattcgcgcgcaaagatgccgacgaatctatccagggagatttttcggtttagacctgtggttgaagacgcgtcaacacaacaatgggtcttggggggnnnnnnnnnnnnnnnnnnnnnnnnnnnnnnnnnnnnnnnnnnnnnnnnnnnnnnnnnnnnnnnnnnnnnnnnnnnnnnnnnnnnnnnnnnnnnnnnnnnnnnnnnnnnnnnnnnnggggggggggaagttggggaaattgacgagtcggtccgacacgttccaagcaaggggacgggaagactagactaggttgccacgttgggatcgtggctaacctcttcggacttaggagattggctcacgtacctggtccggttcaatccctggggaattgagatgggatgaagttgcgacgcgaaacactgatcgaacaggtttgcgcacagatgctttcgagataagagatctgaaagacaagggacgatcaattcacaacattcaaaatattggcaattcggatttcgagcgcgtagctgcaaaaaggtccaagagatggaaaagatcaaaaagatcaaaaaagaaggttgatatatcaagattgatgcttaatccttagttcgaggatgccttgcaggtggcggtaagcacgaggcaccggaggcggaaaaatagccacgggagatactaacgaaaactagagactaaagagaaaaaaagtcaggagtcaacgcgacttggagcggcctaaaaggtaaagacgattaggagaaaggaaaggcagtcctcgtgggatccgaggatgctgtggatccgctgggtggaccgcgtaattttggttggcgatatcgttggtcggtatggaaaaattacatcttttatgtttttggatttggtatttctttttggaatatattcaatattgaatattggatctcttggggcacctggaaggataatctacgatgtatatgtatatatataaagcatattggaacatttgcttcaaagagaaaaagaggaaaagaaaagaaaagaaaagaattaaataatttactttctgatctcggaccattccctttttccacacaatactccgatatttaactggcttggccccctttcccctcagtgtcttccttaccggctaagctttccatgtccgtgtgataacacctttttctttttctttttttctttttagtttccagtttttggtttggaaaagaaagaaagaaaaaaaaaagcggaacccatccaagagaaaagtggcaacttgtttctcgcaaaattcttcaatcattcatacaaaaatcctgactatgaatggaagatcaaaaaatggatgtatacaggtgttgttgttttttgctaagggctactggttaggttcccaactggaggcctcttagtctacccgcaactcgggtgcgtcgagggagaacctagcgtgtatggcccgtgggtaccaaccaagatgtcagagaggagccaggggagggcttgagcctgaccaaggtgggcgctaggaatggcgtgcccgaggaacctcaaccgagcgatggaatccaggctcaaaggggtatagagggggagatgtagggagggaactaaggcagaaaagggcgtagcgcaggtcgggggaagaagaagcgatgggactcgggaagaccaggcaggcactcggtccttggtgcgccaataggagaaaaggggtggggtcagcggtggggactggagaagctgtggatagaccggactggtttgagtttagcgtcaaagtctgctgcaaaggtttaaagccgaggcggttgaagccggtgatagcttcttttcctgaaaaggaggttcagtgttgcactttgattacagtatggtacggagtatactgagtgtctaaatatatggaatgggaatatatatgtagcggaatatacaacatatccaaaatgcataaacaggataactatctcctacgtactattgacgttcacttcaaacctatcaagtcatggcaacatctcgtcgcgtaaccgtcacgatacctacagacgcgggagtggagacagtgaaataacaacaacaacccccggtgatcggagccctatctccatctcctgacatctggacgtgtctggaaaaaaaaattaagatcaaataatactccgtagaatgattcgattttagaacaaagtcccgttcctacagtctcgatctcaatccataccatgagtgatttatgatgtttctaccagataaccgttgctaccatagataattatagtacaaagcacataccacaccaatctcaccaaggaagaaaagaggagaaagggggcccatcaatttcctagcgggatttccgtggaacgagcccattatcaccgccaattggtcacgaaactcaccaaattgcgagcggagtcctcggcggctctccggtacgatcagtgtatatagtggaggatagtatacggcagttcttatgtatttgaattccctgaattccctgaattagctattttggctatattgtatgttgtgctccctatttacggagtactccgtactccgttattaataatatttactttcagcctcccaatcagagaaagtgggggaaaatcactcagttaccggtaaaaccccaccctggataaaagcgagtctgataggaagaatacgggaaaaaaacatgcacaagatgcaaggctctcagctcggaaaaccaacacacactctctcagtgatgattggcgcattgggggggcgcatctcaccccgcaggcgcggaacctgttcctacactgccggtgaggaaaagggaagtggatgggggttgaagatatttaatagtttggtatttttggatttaggcatttagtcatttctagttagttgattcttcagctacctaactgttacaaaagtaccttgttatcaggaaataatagtctaatagtcgataatgcacaactcaacaccgacaatctccaaacacaccagtggccagtgggaccagcggactccgcgcggacaacacacagtgtctagtgcgggatatccggtgtcgagcgcagaacgggatgatcaatatcaaattcatacggcgcgtcaatcattggacgccgcagccgctcggtatcacagcgccgtatgcatacggaggtcaaccaatcaataataccttggcctgtacggagtcacttcggacgatcatcccaggccccaatttcccaaagctgctggcgatttgtctatttcttatcctattttttatttttctcatttctctccttatatatacatcctccgtactgtaatataaagcgcctttcgcggctgtgctcaaaagggaagagtaccggccaaattaaatgtctcaaccccaaaagttggacctgcagacgctcatccgtgtcacttgatgcacgtgggcccatttctgcatgttgctgggatattgcatattgcatatcgacttgccctgtataaaactttgtacgaatatcatcatatccacttcgcatatttgcactaaatgaggttaaacacgctggctaatggacgggtcagaaaggagggcggaaaaagtacccagatggggtctggagcttaccgttcaatatatgggtattcttttcccagcgctaatcgttcaggggcgatcagtagtaaaggcttgactttgtattctgttctatgttgatcgcgatctccagccgggatcacttttgaactagccctaagcccaagcccaaacaataagaaaccgaaggaagaacaaaattgccctaagttgatggcatacagtagtctaaagtcaatccagaaattgaagtctgtgctcggcagatacaaatataaacgtaaatatcacactcgaactaaaattaaattcaaacccgcaatttccctaaactccacccgtcgctggccagtgctgataagttgcgagactacgccggacacagtaagtctcatccgctaatacttcggcagatcgcgtttgagagacctgtgcggatcaccacaccccggatgatgatcattgagcggcgattgtgtcttggtctttctcgcgaatttgatttgatttgatttttcaaggtcgagatcgaaatgcaggatgaaacctcgggcaaagatattggcgttgaccttgatattgaaatcttgaaatggcaggagactggcatgagtccaccaatgaacgggattgattgttgcagggattagatgccgagacagggatttaaggaagttcagcgagaatggtatttactagaaagtgactcattgtcactatgcctatgaagacacgaaatatattgccagaatatatgcctaaattaatctagatatcgttatcatttcaatactgcaaatcaaagttatgtgctcagtaacagccctaagaccaaccatgcgagcagtgtatgtatatgttgtattttccatgcatgttctacgtttgctctaaacaacacgaaaacttaaacacaagtacaatatactcttctccgtactttctttttaatctttcctttttcctgagtggcgcaccgcactatcgcctgatacagcagccgtcgtcttactagcgcaacccagtacataccccctggtaaaaaattccagggttcgctttcgatctggaccggcgacatgagtcgtacccacccttgttctccgacgatgcgcgtcggatgaaacccctttagggcgattgggcgattgctatgccgccttgaagacggaggcgcttatgcacactgcgggaattgagttcctcgttctactccgtaccggtactttctttgacgctagtctgctgcccgcactactgcacgtcgctctcttaggcgtttcttagatcttgtactgtgttttcaggtgtatttttgtgtattcttcttgtcttgagggtcacttcaatgaagtacggagtagatgttggatgcatacatgtacggtatgggcttatcgaaccatatactctctacagagtacagaggacaaagtacacgcattgatatcctatgcagttctgtttttggtggtcaaattccccgagtagtactcctccagactgtagatagcaaatcggtacttgtgtcagctaatcacactatcctgatatcgttgtgcacgtggctcggtatttctatttattacacctagaatatagggacctgtgaaatcgacgccgaaaatgacagcctctggcgccagaaacggccgcctttccacccgtaactttggacggccagccgccgcttgaccgcccgctgccctgtacagccccctattctgcacccaaccaggactgttagtcatcctcctctcgtcctgttgttggcgcttgacttcaacgattgttcccccgtttccactggcgaccaaacgacgccgaaaatggctcccttctgcctccaaaccaaaggccccctcctttttgcccagcctggtcgagcgcttataagatgcttcgtccgccctctcttctggggggtctttcaacgccctcctctcatctcaactccgttgccttgatcgaccttgacatatttgactcccaaaactcctatcgcacaacccgatccctggccgtttatcccacttctcctcatggcgcctgtgtccatgcccccagctcaagttgatgagcaccagtactggaccgaccccatcctttgcgaggaaactcgagccagactgaaacatttccggagccttggatggcttcctccaaacttcaagccaagaacgctgataggaatcgccacggtcgaacggtactggcggaagtgagttgactgatgaaataaaccttgcggctggggaataacactgaaatagattttgcattcaatcgaaccaggactacgtgaactaccttctgctggaagatcaagctatttacatgaactttttcgactggatgttcaaaacatcgcgagagaaagcacttcaatcgtacgacgaatactggcgccgcctttgtcaatacttccaactattcgcccgtcgcagtgttaatgatgatgttcatacgcagatgcgacgcgtacggttgcttcttctgttctgaagaggattgggctaactagagtatagtttcttaatggcgtatttccggctgagcgcaaaatttccagacgaacaaaggacaagaatactctagatgtggatgtcttttgtgtgatctatcggcatcactgggtccattcgcggttttttcgtcacggaagtatgatcgtccaatttgctaccgtccaactctggtccgccattaccgggacccgacctggcgtcttgcttccacagaacacctctctacccggtgactcctccctgagcaagcgcaaacaatatcccacttttcagagtgatcttccgaaacatatccccatgacagaccttccagactcggtctgctatcgcgacattgagctcttttatctacgcgacccccagagcaaacgtgacgttctctgtgcggtcatagagtttcgtaacctgaaaggtcggccggaaggtgctgatgggtaagcgtggttatagtctcaaatgctggagcatcggattaactactgacagtcaccgccagaaccaaatttttcatgcatggcgattaccaactggcatattgtccgatcactcaaatcatttctttcgcttttcgagatggagcatttgttaatgccgaactcacaccggagctcatttggcggctccgagtcccaaaacgcagttcctccttgccgctccgttggaagccagaggttcttaacacgcccctccttcggcgttttaatcgcacgccatgtggctatgagcttcacccgtcgttgccaatgacttatgagtccagtcgacgggcacttcatgagttaggtcgagatgctcgattcgaaaacgatattggacattacaattttcgtcgttgggtcgcaaatgaagtcaatcgtaagtcactccagtgccaaatctccggaaactttaccaccattctacgatgttcgtattaagtctgactaggagcggacaggaaatttcactagccaggagcggcagagagtgctaggccagtcgggtgacgcggtctttgaaagacactaccagtcacagttcattgcacgtgatctccaacatgttgttctccttcggccgcctcaggagggtttattgcgcgtcgctggcagtatgctcaggaagagggacccgttagcgccgtccgagcttaccgacacacataaacgtgctatttgccgacatccggaaatgcttgagttgaaacgagaaaagagagagcttatggcggagatgcgatctctggctggcactgtgaagaatgccgaaaagccctttccacacctttatcaacgtcacaaagctgtcgacagagaaatgaccaagcttcgcaagactttggcaaccgatactcgagagaccgccagaaaggattatttccgtaacgcacctgtactcgaagtcgaccgacagatcaaacagcttcttggcgatcctgatactgaatcatgcgatgcggacagttctgacgatgaggactgggagttgcctaccccgacgtacgttttccttgaacgggctcgcctcgtggagaacttttatggacctgaagcggagaattatgacgaggaccagctgctcgcgcgtcgcatccaggtaaccaaggacatggtcgcgctcctgaggctttgcgagcccagcaggcgaggcaaccgtgttgactggaaattcgacgacgtggatgatgacatatcaggccagccagaggatccctcggctcctgaagaagacaatatgaaatgtccaacggatgtctgcatcatttgctatggtatatcccgtcgctcggcgtcaaaccctcctccacatatatttcctaccaaccgtccagactctcttcgtcgtcatctcatcgactctcatctgcgctatgctcacgacggaatcagctgcacctgggaggcctgtcgcaatcttccgacgtttaccaaaatcaccgaatttttggcccacgctaacaatgagcacatgtacgatatcaagattaaattgtgtcacctccccagaatgccacagttttaccctagcgacggttcctccagagacgcgtctacggagccggagactcggcagggcaccgaaactcccgcctcctctcttgattttgatatggcaaatattgaccctcgattgatggaaccgggtcctatcaccgccacgaagccatcatgctgccctcctagcaatgaagttctcgcctctgctggatgtccaatgacgagcaccggttcaaacttgacggagattcttagcgggcgagtgacgaggggagcagcaaaagcggcgaatcgagaacctgaccctaagctggggtcttcatcacagcatgggacgcgctcatctcgaaaacgcgggcgcccagaagagctgccttggggagaactggggggaaagaggctgtcgggcgaattgaaatcttccatgatcaaacctacactacgtcggtcaaagcgattacgagccctgtgattcgtgtactcggtctatttatgtttgtatattcgagtgcaatccaggacgtctcagtagatcgtacatcgcttcccagttatgcaatgaatttagccttcaactattatctctccattagcaggtcataaaataagtaatgacctatggtggtcaaacgaaaatgttttaaggaatgataggatagcaattgggctaaacataattctcagatcaattcccaaatctagaggtaccagtgtgtttagtcagcttactgaaaagtcagactaggtgaggctcgttacattaggttgttgattggcttccaggaagatgactaaagtgaccctcaatcgcaacagcgaaaacccaaagggtgtcacgagacttccgccccaatgatctcccccacggcaaacaaagtagagataggaaatctttggtcctttcttcgtcctcaacttatatgcaccgaaagcgtgctgattctagattttgaatagggtccctactttccaacgccagttcagaaccgaaaggaacctctggacggcccgaagactttgtaacttggtatcacttcaaacaatttgaattgatgcggggcttcataaactgagatcaagtacagatcttccttaaaagagttcagaccctccatctggctaatgatcggcttccagggggctgataaactttctcttgaaatgcaaagtaataaatgggcctgcaggagaaactgaggaacgggactaatggagaataaacgctcacaaggactcacataagagagtgaacaagtggaaactgacatgatggtcttcttccaagaacgagataaaactggaacaacgtatgaaagtctttaggtgcaatgatacatagtgaatcattagcgtatagatggtgcctattccattggcaacccgtaaaagctcgacgattgcgtccgcttgttctgaatctaacggatattccgagagagtccagtaaagcttgttgaaactcacattacgaagttggtccaatccatgtctagtagcgaagtcatacaaacgagcatgcaccagcagtgtcttaggatgtttgcacaggtggtttccatctccacaatacagcaaaaatatcgaattgtcgctgtgcacctggatatcttcatgactcgcaaaataattttctttcaagggaagtagatcctatattgcaatttcgatttcatcttcgcatgcagcatgactcgaactatcggctgctggaataaggacagagtagtccccactgtgaaggtactgaaggatatggccaaagatatcctcaacatcgtcgtcaaccacataaattatttcgggcgaacttttataacgacaccggaggctttggattatcccgctgggcgcagtgaatttcttcccgttgggaccaacctccaggtatgccaggggggagataaagtgactaagttgtttttagataacgcctccagaggaaaggaaagcgtacttactctggccgtacttgaatcataatgagatattccgtcggtgttatcaactgaactcgaggcagcaccatatacaggagaatcagaagcgcagcgaatttcttcccgttggggccaacctccaggtatgcgaggggggagataaattgactgggtgtttttagataacgcctccagaggaaaggaaagcgtacttactctggccgtacttgaatcataacgagatattccgtcggtgttatcaactaaactcgaggcagcactatatacaggagaatcagaagaagtgagcagcatgagtttaaataattgatcagtggctaacgagaaatgtgtcgtcgtctacgtgctccctcaatgtgactggtccaggacgctgactcagcatgctggagcaaggcccacgaatttgatcatcttctttcgtggtcttcttctggaacgcccagccccgcgacctgcgtcatttgctagcgggaaaaggggtatctagggtagaggttgagattgatcttggtgtgagaggctcgcccctagactgtcttaccttcagtatcaaactggagagttcaagaacccccttgggggcgtgtaccaagaaatcgaggctagatgagctttacgatggattcaactaacaagctggacatggcgcttcttgtgcagtattctgcatcactagatattcttgaataaaaaccgagtattatagcttccacataaagctcaccggcttgctcagtaataaattgtaataggttgcccttagacacgcattagctcgtgctctcttcataggatttggggtataagagccgttgactaattatactttcttttcttcttctatattctaatcccttccctggttgactacgacgacgtttctgagcgtgagtagattcaatttgactaagccagtatggtgtgtatcataatcttaaagttctgtgggctggccttttcaggtggggagccaaaataacgtagaacataatcgccaaaggcaacagatggagcgatgttgatatctttacagctgtgtattaggaacaagttcttctgcctaaatccaattattcacttccctgggcggctgggcctaacgtagtacctaggaagagagaacacgctccaattacagaagaagtttccataccacttcattttggtagacgtatgctaattagcaacattagtttctcgctcacagtccaccaacaagagaggtggccatctctaaaacaaattcaatgcgaaaagtctcagcgctatatctcaacaacgatagttgttgttaagggctttatacttctagatttttaccagcgtagttttcgatacgtcaacattatatactactaaaaatgcttatcgtgcttggccacgacgacatttgtaagcatgattagattcaacttggctaagtctgtatgctgtgtatcataatcttaaagaacatctgggcgggctgccattccagcaacagcgattcgagagcggttcacgtgggatcatgtggtgaccaacgagagcttgccctttacaacatgtgcccaatctcaacccactctgtattggatcacctaggtatgatagagaccccatcgcacgctgagaaagtcaggactagcctcacgttgacagctcatataccccgcagcgccgaccagaccattccactcaaaccgggcaatcgaagaattaatgaggtcaatgatatcttggttgccgatgtgaaccgaggcaccactgctctcggaggtgacaccaaacgcacaggtgccgtattgaaccagctgatgttggacgccgaaacctatcaccgtctaggtaccaccaccagcgatgtttgcagcgatttttttgtagtctaacacacggggagagccgcccgaggaccggttgataaaggtagagggcccgcagtcgttcacagagttcctcgcgacaagtgtcatagtaggtacaacgggctggggggcggcggaggcggcggcggcgatagccgcaaccatagcgcttacttagaacttcattttagaaaggacggaaggattggatggcaattgagatattactatacgtgctgcacggaaaagtaagaagagagaatgtgcttaatattgttggttgtcttagtacctaggaacctatgataacttatatatgtctatatcttatagagctcctttagtagctctgattatttactagctagacctaataggtacgtaggaaatgagcgagctagtatttatcgtcctatctggcttactatagaaatagaaataggtaatatttcgtaaattagatagtgtcggcgctggcgtgataaatatcgctaagaggcgcgaaggagtctcgtacgacgtagtctttattctccaccctattttaataataaccgaggtagtagctaattaaatgagctatagggttacaacgctctttctatatatcccggctagtatagtttttaaattaagaaaaatttacggaggataacccctaggagttacggtctagaggcggacttagcgtctaccttcccctatatccgatataataaaccaggagagatcctagtctatatattattcgcgaagggaagctgattatagaagtcaggcagagaaaacggatttgctaaacgatcttaaggactaataatcttagggatgatttcttataagtttctttgattcctacgtcacgattgcccaaccctagcctgagacatctgaatggacaatataccgcaaaacgttctagccaggccgtaattcatagtgtgactgttagccgcaggaacctagtccgaagaatgtaatgcctggaggaagctagaactaggacggctagaccgtaagcgcgataccttcggagtccgaagttctcccgttattgattaaattatgtgtccttagcaactcgtgttgtgcctcttccgccgagaaggatatggggggggggcacgaatatcggggggcttagtgtacaaaccaggctagaagaccatagcagtagatcctataattgagtaagatcgatcattaataatatccattctagataggacgtaggtgacaattagttatacaatcaatggtcgcttagtctcaggcaaggtatcggaaccagagtctccgcctatatcaaaattttattaagtggagtgactagaggtgaggccgacgaaaagaacctgtcaaacgatgcccagaatacccctacaccctggtaccgctaagtgccgctagagttgtcaaagcgctatctctaaccaaagagaattatttttgactacttcctgctgccgcaaaattggagcgagcaagcgatgtaacagcctggctagaacgttttgcggtatattgtccatttagatatctcaggctagggttgggcaatcgtgacgtaggaatcaaagaaacttataagaaatcatccctaagattattagtccttaagatcgtttagcaaatccgttttctctgcctgacttctataatcagcttcccttcgcgaataatatatagactaggatctctcctggtttattatatcggatataggggaaggtagacgctaagtccgcctctagaccgtaactcctaggggttatcctccgtaaatttttcttaatttaaaaactatactagccgggatatatagaaagagcgttgtaaccctatagctcatttgattagctactacctcggttattattaaaatagggtggagaacaaagactacatcgtacgagactccttcgcgcctcttggcgatatttatcacaccagcgccgacactatctaatttacgaaatattacctatttctatttctatagcaagctagataggacgataaatactagctcgcttatttcctacgtacctattaggtctagctagtaaataatcagagctactaaaggagctctataagatatagatatatataagttatcataggttcctaggtactgagacaaccaacaacatcaagcacattctctcttcttacttttccgtgcagcacgtatagcaatatctcaattgccatccaatccttccgtcctttctaaaatgaagttctaagcaagcgctatagttgcggctatcgccgccgccgcctccgccgccccccagcccgttacacctactatgacacttatcgcgaggaactctatgaacaactgcgggccctctacctttatcaaccagtcctcaggcggctctccccgtatatcagactgcaaaagaatcgctgcaaacatcgctggtagtagtacctagaaggtatcaggtttcggcgtccaacatcagctggttcaatacggcacctgtgcgtttggtgtcacctccggcagcagtggtgctcgaatcggcaaccaagacatcattgacctcattaattcctcgattgcccggtttgagtggaatggtctagtcggcgctaagggctctataagctgccaacaggaggctactgctaatcttatcgacatgcaatggggtctctatcataactaggtgatccaatacagagtgggttgagattgggcacatgttgtaaagggcaagctgtcgttggtcacacatgatcccacgtgaaccgctctcgaatcgctgttgctggaatggcagcccgcccagatgttctttaagattatgatacacagcatacagacttagccaagttgaatctaatcatgcttacaaatgtcgtcgtggccaagcacgataagcatttttagtagtatataatgttgacgtatcgaaaactacgctggtaaaaatctagaagtataaagcccttaacaacaactatcgttgttgagatatagcgctgagacttttcgcattgaatttgttttagagatggccacctctcttgttggtggactgtgagcgagaaactaatgttgctaattagcatacgtctaccaaaatgaagtggtatggaaacttcttctgtaattggagcgtgttctctcttcctaggtactacgttaggcccagccgcccagggaagtgaataattggatttaggcagaagaacttgttcctaatacacagctgtaaagatatcaacatcgctccatctgttgcctttggcgattatgttctacgttattttggctccccacctgaaaagtggcaataggcaaaatctcagttcagtctgagacaagcatcttgtgatacactaatctggcggccaaaattccctggttccataaacagctagctggggctttcttcggaaattattctccacccgcaggcaatttgtgtggtagatagtattcaatttactgcaggaaagccgagagtatacaagagagccaatatctttcgcgggcgagaccgaaacacatgcccccggctctttgtattgtgtctcacgttctcagtttcatctagtctgctgcttcgagatctaccctccaaataacaaacatttcggagcaatggtggtgactatgtacgctgttcgataaaatatccactgtaatcactaaaagcataggccatgacgggattgccatagccgacgccagctcaagaccgaggcctggtaatgctggggttagcctcggagagccgccatattgcgtctagcgcgagtaacgctggccccacacccgcataataggttgggggccgaaatatggactccaatggagtcataagttggagcaggttttcagcatgcttcccaaaatggccttatccttctaactccaatctctaagaaataaaaatgcttatactgatctcttaaaagtccgtattcgttgttgtacacgttgctggcagatagggcttcccttaacgaggactgcactgcatcgaacaaggtagcccgatccacttgccaaaggtgcgccttgtcttagatcgtataataaaaatccgaaacgaatattaatcaaagagaagagcacactagcataggctaccgcacgctatctttcttccatcaatactaccctaaaataaaattgatcctacccagcctcgaggacaccagtatcaataaactacttaacactaagcgacgcttaactacacaaatctaatatatcttttaaataatatatacatagttgatcatccagcttactatattattataacttccagctattccgtataatatagggtcggtaggcactaacatagccaccgacttctcggagaaacggacatagcacgaattatctcggatacaaaattgagcctatagggagaggacttcagagccacagagcgcctacagtctaaccatcctcgataggacctctcccacttgatgtcttactttttagaactaaacactagcggctacgggccatatccgccgggagtttaaaaattgggcctccttaccgcaaagggggatccgattgacctatggtttgcgttattaaccactaccccactaggctggaaatggattcggactttggtctagtggtcaaatgctggcttcaataactaatatgtgaggcaatgagctcctctattctagaaaatgtctttcgagaatttaaacggtctaggattcttaccaaagaaaactctgagttctcggccaaactgcgaagacccaaattgtcgatccttacctttacagatctagtttattttacactaatcattgaactgttgagcaatatataagtggttggcatacatacatttcactttcccgctgcttccctttcgggtaaaatgtccacagcatacccccaatccagactatcccacatatcttctcctactccccgtaagcctctcaaagcccctgttcgccagattgcttttcgcaaagaatacgtcaaagacaccaaaactcaacttgtcctcaaatcgcaaggtgatgctcaatcggcggttgcatacaaggttcttgacgaatatggctcgcttcagttcactgtgactgggcggaaacatagtgatcgcatttgtcgcgaaattcgggactcgtctgggttacctttgttcgaacttcaccgaagaacttcgctcacagctacctgggctgttacgttacccggtagcaacaatgcaagtttagctattggttccccgcgatggccatttgggtgtctctcagctggaaacttcactctgtctgctgagaatcaagctgcggttgacacaaaggatggcgatgagaaaaaggtcacgttgcttattgagaggcatggcaatgccttggcactatttgatatagtggatggcgataggaaagtggctgaagtgcgcgagagtatacaacacaacgagaagttacctttgacgcggagttcctggcaaaaatatcggcctgctcttgatcttattatcacttccagagttgatcaatcactggtgagtgcctcgaaattattggtggttggacgtcagattgactttgtaatagattgttaccgtgggagtcattttatcagactgggtctttggttcgacttgagtacagttctgtcaacggccggtgaatccgcaaggcctcatacatagcaatagattatcactagacaactatatctgtccgacagttctgcgtacattagaacaaaaagggctctagtagtaatttacggctgacgacttccaaagcgatgtaatcatatagcaatatgggcccttctccagggatacaaattaccagggttgtgtgagataataccctgcccagcttatcactctcggttgatccaccgaccaagaggatttcaaaatgaaacggtgactatgcataactacagtatggattaaggatggatagataaatgactccatttaccctcaaaacgttgatttgaccactagaccaaagtccgaatccatttccagtctagtggggtagtggttaataacgtaaaccataggtcaatcggatccccttttacggcgaggaggcccaatttttaaactcccggcggacatagcctacagccgcaggtgttcagttctaaaaagtaagagatcaagtgggaaaggtcctatcgaggatggttagactataggcgctctgtggctctgaagtcctctccctataggctcaattttatatccgagataattcgtgctgtgtccgtttctccgagaagtcggtggctgtgttagtgcctaccgaccctatattatacggaacagctagaagtcccaataatgtagtaagctagataatcaactatatatatatcattcaaaagacatatcagatttgtgtagttgagcgtcgctcagtattgagcagtttattgacactggtgtcctcgaggctgggcagggtcaattttgttttagtgtagtattgatagaagaaagatagcgtgcggtagcctatgctagtgtgctcttctctttgattaatattcgtttcggatttttattatacgatctaagacaaggcgcacctttggcaagtggatcgggctaccttgttcgatgcagtgcagtcctcgttaagggaagccctatctgccagcaacgtgtacaacaacgaatacggacttttaagagatcagtataagcatttttatttcttagagattggagttagaaggataaggccgttttgggaagcatgctgaaaatctgctccgatggagatttgaggcgcacggaaaccaagctctgactctaattgtggctcgtattttggcccccaacctactattcgggtgtggatctagcgcagctcgcactagactccacaatacgcccagcatcaccaggcctcggtcttgagttggcctgtcaatcctgggatggcctgtgctttcagtggttagaattggggtttgcaattgagcaaggtgcatagccaccgtcgctccgaaagttcgctatcttgagggtagatcccaaggaaagaaattgagagcttgaggcataatggaaaaagccaggaacgattgtttcggtctcgcctgaaaaagatctcggtcctcttgtatacctctccgctatcttgcagtcgattgaatactagttaccacataacttgcccgaaggtggagagcaatttccacattatccctatcgaggaaaccgccaactagctgttcgtggaatcacggaaatctggccgctggattagtgtatcacaagatacttgtctcagtctgaactgattttttgcctattgccacttttcgagtgaagagccaaaataacgtagaacataatcgcaaatgcaacagatgaagcgaagttgatatcttacagctgcgtatttcgtataacttcatatctaaatccaatccttcacattcctggccctaacgtaggagtacttattatttcgctggctaaatcctcggaggcttatgctccaattccgggagaggagacttcgatatcaatttattttagtggatatatgctactttcttagcggcattagtttgtcgcttacgctctaccaagaggagaagtcgtggatataaaaggcgttcaagatcctcccaaagctgatgaaaacgtccttcaaaattagagaccctttcctttgagacaagcatatcacttctccctcggcgaatccttcgtccttgttttagtgtacttttcttcatcatgaagcttccaattcccattgctttcgctaccctcttggcctttgcccaagctgctccatcgggccccggagaatctcgcttggaagcacgagcttctgtcaacgactgcggagactcgaccttcataaatcaaagcagtggtggttctccacttgtggctgactgccagcatcttgctaggaatattgctggcggcggcacctggagagtcactgccaccggcggccagcaccagctagctcagtatggcacctgcgcttttggtatccaaggccacaaagacatggatactgcacacgttggcaatcaggacattatcgacctcatcaactcttccatcgccaagttcaactggaacggaaaagtcggtgcgaagggcgatatgttatgtcagggcgagaaggggctcatgggtaagcccaagatgacgtggggtatctatcatacttgagctatagcagtgcgatcgatggcaggtttatttgtaagttgctctgggatctcatgtgtcctatatacggagaattgggcgctaatcacatcttgaaggcatttcatgatcgagacaagcatattattgtgtcacatgcattttcaggccatgccatgctcagttcagtgtacttaaatagtggaaatatcggagggactgtctgattcaatctatcttacgtatattcgaaactgcgccttaccgtagaaatgtggttattacagatcttagacacttgttgcatgttgactgaaatgcggcatagttttatcacgtgtatccaatcttgtcttatttggctgttcatgatattgagtgtggcacaaaaaacataccgctccggaaagctcgtttcggtaatacacccctaacataatcgcgccggctataacgccctttttaccacagtcgcaagaagttgctcgctaaagtcgcccagctcgaaaggttgagagaacaccacccaatcagcacctacttcgaggtgccattaccagccctcgtcgccctcaaaaaagccatgttcaagcttgaaaacatttggaccctatcccacaaagggtgaggtgaatgaaacgtttgaaatcgcgacagctccccgtatttagataaaagattgttagagtagtctatagatacttttccacttagactaaatatcatatctagctattttagggggtttggagaactttgctaatttgatgactgattagggcgatgtaattcccagtaccacaataacgcaagttttcgatttcttcgaaataggtatagtatactaaaaattcttatcgatacctctctgacaataatggattagatcaagttgtggtggttgacgtacaacgctatattctatcgcatttacgatgtgtttcgcagatgtcggtcgcctggagtgggtggcttggcttggctgtcttgcctgggcgtttcggttagagcggtgggccccacccatggtatgtcattagtgtccgccatggccttttcttttcctttcctccaacgcatcactaccaacacccttgaaaacgaacactggctgaaacatttttgaaagccacgtgattccgtcttgctaatgcacatcattgagagcctcatgctggggtgccggcatttgttgcggaccttccaaaggcgcagccttgttacgactgccctctgccttgcatttacaattttcctgcttgtacctcggtcaagagagcaaaacattgcagtgcgacgcaatccaacagtctatgcttcaaggtatattttctggctacccgagctaacatgtctccttgagagttctgaacgtcgcctgaagcggcggttcacgtccagtcgctaacatgctcatctccttgaagtaaaaagaatgccttttttttaggttcgggcgctgattcggatggggtgggtctcggtcagcttgttttggaaacttcccaggggtcacaatccataccttacaatccatatcctgaatataacagcgctgcatggaaaagaatgtggagaggaacttaccagcagtgtgttggtgcaaatggttcagcactggaccccaggaacgcagaaacagcgatgaaagggtttcgctggaatcaatcaggtgtgtaagtgagactagcctaaggtgaagtgttgtaactgatagcactctagattttccggcgccaatatttggatcttacgaggcgtggaaccttgatcggagtttctgcaccgaccggtactctcgatatgcggcgtacggttacacaggggaagttcaagatggcgattcttttgacacctctagcgaagtgaagtttgagtatgtgaattgggccactttgcaacaagactgcttgcagcgcaatgcagaccgataccacccttcaaatattccaaagacgttgactctacacaaggagtataataaaggaatagatgaatatgtgttgagaggagaggacgcagagacatcccaaagtaacgcctctgctatcttcaaaccacggacagcggtggttctacgcacatggctcgacatggagtatacggaaaacgatctccattatatccagtcgatgatcatggagctgtcgctcttatcgggcgcagaatatgaggtagtcctcctagttgatgcgaaaaatgctagattgcctcgtccaacggacaaggccggcatagacagtctcaaaagctcacttccgcgggagctccaggatctggcagtgttcttcaactcggagatactagaagactggtacccgaaaatcgatgttcacgtgtaagcttgctttctattcattttcgtttccctacacctgttgtcaatttcggaggagacgctaatctttatctagagccatccttcaatacttccagccaatgcagattttctctcggctgaatccacagtacgactttctctggcagtttgagatggattcccgttatacgggacatttctataactttctccagcaggcctcggaattcgcaaagcaacagcctcgcaagaatctatgggagcgtaactcttacttttacatccccgctgtccacgggacctgggacgatttcatcgatcaggtagaccaaagtatgacgggccttgatagtgtttggggaccgcggccagcaaaaggcatcaatgttggaaatgaagccccaaagccaccgcggtcaaacctagaggatgactcttggagctggggcgtgggcgaggaagctgacgtgatcacctggttgcctcaatttgaccctcggcacaccgattggccttttgccgatcgggtgtataatttccgccagaagggacgtactccgcgccgggcatccgttgtcgcaatgtcccgtgtctcggcacggttgctccggcttatgcatgcggacaagactgagaaggggcttggactagcatctgaaatgtcccctacttcctgggctctttattatggactgaaagcagttcaagttcctcagcccatctaccatgcgcacgagacgaatcccgatgaactcaatctccgagctaattcaggcaagccaggtcagatcagcgctgggccgaacagtatctggagctggaaccagcacaatgatatattgatgaaaatgtcctatatgtttggatcagaatttcccgagaagatttatcgagcctggctaggctacgacaatgcagaaaaagtgagtacctgcgctgacgccttgacctgccgcttttccgcgcgcttgggtccccaggttgatattcgctaacaatacgcggaaaggaggggcgtcgtcggctttgcttgcctccgatgttcttacacccggtgaagaacacaaaagaataaaccggctcaatcaagatttgggactcgtcgtcattcacgcgcaccaagcaatgcaaatttttctattacgcactcatggcatataaggataatcacgatattattccggaattccgcatgccactttgtctgttacccaattctacataaaattatcaaggaaagaacgaatactgtctgaaagttgttatgtacaaaatgaccaccgcgggctaagaaccagctcgctctttcgccgcatcatgctccgcgcgtaaagcctctgcatcattcatctcaaacccaaaattccaaagcctctccgcaactgtcaactgagacttagacttgacctttctgggtggtaaaatatcatcatcatcaccacctttggagctcttccgcccaacatgctgcacaatgcttggcgtcactgcccaacgaatctcatttctcgcgtttgcgtattcctccgtgagcatgtcgacgtatccgatgtgcttggacgtgtatagctccacaagctccggaatccgtgagcgaggaaagacaaaggcttgcgaacaacatccaaatttgggcatttgatatacgcccctcgatggagggagcatcgtcacccggcccgcggcaaagaaaagcccaatcagtaagggcgtgaatacaccgcttaaaatgacgactattgtattcggcaagaaggagcgggtgtaggggttgagttttcggaagatcaggagaacgcaagcgacgaaacagacgacaagaatggagtaaagaaggtagttaagccattcttcggcgttccaaccaagaaattcttcggtgtaaaaaagacgcagatatagccctagtaagtaataccatcagcaaagaagaaaaggcaaaacggttaggagttaggggtcagggagggagcgaattcgacggtttaggatttgaatttaagaacctccaagtccgtaatggttaaaactcacaatttgccgctcccgtttctcgagtctgttcttcggcagaggataaggctgctacagtgcggtgataccatccatctagagcgacgagatcatcttcaagcataatgacatacggcgtgtcaactgtcgcacatgccttcaacaagtatgtatagtcaaagagagccttctcgcgccctgctattttagcctcattggtttctagggagcgtatatgattgatatcaatttcggaggcattatatagcaacacctgatcagctagtttgtgtaaccacggctctgcaaacgcgggatgctgcgacggatctgtgtgcgcaataaataggatcaagtgtatgtctgctctttcttcctcgctcagaccttcaaggagtgtgcccacggtgtctttgaaatagcgggcgccctttctcgcaatggtggcaattcccaggcagaaatgaggctgccgtggagctctcgttatctgaggcgctgcagcattgcttgctgcatcgatgaaagaagctgcttgctccagcctgatagccgaatatacgggatcataagcattcattgcatcaaaaaatattgaggttgggtcgcggaaagactgtctgcgcgcgaccacaaagagcaaggcgtaagagagcagaaagaatagaaaggtccgaagccccttgaccgagctgattgctgagaggccaagagtggggactagccggttcacaagcatttttgaaaggcgaggataaaagtaaccaggattcacgttccagcgatgatggtagattaggttgtccgtaagaaggtttttagtgcgaaatattttcataagaaatcattctcgaggctagtaaacccaggcttcgcttagaaaattaaaaattcattgcctgtctcctacaatcagctttgattcgctaattccccatcgggtgaaatccacttattcatagacgagggaccggaagtcagcggacgctatttctgccactagagcttagtccgttggggtgttttctggtttctggtcacaaaccccgggcatattagataacgtattcaactacccagccacccccaacccaaacgattaaattcaaacaggtttatctctaccaaaacgccattaaatcaataaactagtcatcatctatccagacatgcatctctcctatggccctgatttttgcataacccgcatgttggtaatgctctcgttggcggcatgtaatcccttgttttctgtagtgggtaagtactggaagaccaggacagtgattttgaatgagcttgttctaaaccgcgaacttgaaaatatccttgaacaacttgtggttctccggaaggctgattggacacgggtatttggcggtttgaaactgcgacccctcgagccctgggagtctttccaccacagcatatgtttattgcttgcttctccgcccgcttcctccgcttccttgatcgttccagggcatctggtgacgtgcgctgccgcacgctgtattccctgaaacgaaggaacggagtgaaagacaaaccgtgcgtctgcacgaggctgacttgaaagctgagttgacgctacgaaaaacacagccaaatttcgcgccaagcttcatcactctcattagtccccacacgtgctcgcgtctctcttgtctcggggcaattgcgtgcgacagcgcgtccccagtttgcagcaggcttggcggtagggggagggcctagtattaggaaatgcgcgtgatttggggtggagagtgtcgtttgcccaataatattcaatgaacacccaacttctttcactatgtttaaaaagaaaatgaacggattaatatagtcggatttctgcaataaccaattgtttaatcaccgcttgcaaatcctctctgggctcatcctttcaccactattagtcttgtaccactttatgcctattcttgtttattctactgataggtgtctttgcaccatgttgttgcccatttaagcgcctcttctttctgttgcccgcattatttctcgcgttttaaatttgtattcctaatattgactacatatacccatttatattccactttttatctggcgagaatttctaggcttgtatcgaattcattgaagtatatttaagcgacagtaacttcacttctctcctaggggttcatgtttaaccagaagcagatttctgtgatctgccaataggagtattagacacttttttgtccttttgcatttgaaagatagaataacgaggttagcttacccttgatagttgtgcatcacgcatgatggccattagatgttattgctaggcggaatgagagccgaaggcttgcgccgtatagtccaaagttatacacgcgtccttcttgaaattgtcacttccaccgtccgcccagaaagatctatgtccctctagggggcggttagaacaatagttccattcccaaaaagtatccctctggcgatgagccccataggccagcacccgaaaagatcgtgtgtcggggatatttgtgtctctgcaagtgttgtcccatacgttgacttcctttgcgtcgcccgagcaattctcaccggtgaatgcgcggaccttgaatgaaagagctccggagctgagacagaggaacgggattgtctttccgatatgcatgattgtagacggaccaaatgtacgatgttgagctcggttttccaggttagaaacgataaacgatgcagagtagtccgttactctctgtaagatggattgtatggataggagacacaagtcgagtaaaccagccgcatttatagaaatctactgtcatgtgccaaggtcctgacctggacgcctaactgctgccaagtgataaaaaatggttagcttcattttccttggacgcctaacactgccaagtgatcaaaaaaagggatgagtggtacaagaccaatagtggtgaaaacattggggggaggttccatagatgtaggaagagtgttttctggcctatgttctccccaggccgacaaagacacaaatccactaccttaaggccagccacgtaatagatctgtggatctgcgtccaggcgggctttgagtctggagatgtggatccgtggttgggaagctgtggtgggaaggctttggcttaaggccctgtgagatagcacagttgattcgaggccacagattaaaggctgtggacgtggatccactttggacgtacgtccacggctcctaatctaggtgggctttataactgtcaactagcggccaccctggcttagtgaccataagggtcctcggtcttctaactacggtctatatgggtcacagatattttgatctagatctcaagtacattatttatcgcctactgccggcgttttgtcggccgatcatgatcactaccggcttcaattactcgtgcgatcgaattcaccgcctcttcactcacaaccagatcgtcgccgaatgtcataaatattgtgttcgtgccatcctcaatagccatattaaagcactgccccggtaggacctaccgtagattctggtcataaaacgttgcctaacgttctcgcgcgtttttagacgccattcgcccaacaggagaggggtcagaaggatcgaccaccatttggcggaccaagcgattccaatcgccgtgttcatcacgtgcgcggaacatgattgtcactgcagaatgcttggctacatcgctcgctccttctcctcgctcacgagactcatcttattccgtgggcatcttgtctaacctagctatttctgttcgtatgcgtgtatcggtctgcgcaggagactctggtaacgacgaggggcgctctaccagagtgtccttctgcgtagcatcggctataacctgaacctgcggcgaagcttccagcggtacagactccgacaactgttcttcctattccgaccggatattcctcattccatagtgttctaagttttgatcgatcgagctcgaaatttctggctgcggttcgaactcgaccgagtctgatctttcttccggtacctattgctagtcctgagtcaggccaacttggctaaccacgggccatgaactctgctctccattcatctccaacaaaggatgatactgtgcttcgaggaagtcaatttcagtaacaggtcttgctgtctattcctgatcagccgttcgtaacagtacgtttatatcctgctccagagtttcctgtggtagaatggataacttgcgggtttgttagagccgttgcgtgcggtcgtatggtttgaatttagcgctctctcacagcgccgcacttttagtgcccacagtcctagaggggcccgcttttatctccgatgccccacgtccttctaaaattgccagtactccttcaactccttccgatgaagaaagctgcgctgctgtttctaccgcttcattctcttgttcgcttacatacgcttccatattgacatccttcgaagattctcgcccagctacgttttcttcactccatccccgcggctgctcgtcctcggcatcagcaaaacggagtaacttgttttccttgcccgttagtgccatggaattgatatcttcaaatccaggggcgaggaggtgttattacctctcatgcgattccatatctgggtgtggtggtaaagaggtcacagatgtcaaacgaaactctcctggtaactgtaggggttgcatcaaggaaatttagccgtgcgagaccgttgattcttgtagttcttgtggttctgtggaggtatatcttgacccaacagaaagctgccccgagggagctctcgagggggcaaatccaaatccagcgtgactatgttctgattcttcatagtcactgaaaccatgatccctttcaataagctcgccgtgctccagttcatcggctacggctggttccatatcaggaagaccctgcttgttttcactgattatacccccacttccaacgaagccaagtcctgtttcggatgctggctccactatctctcctatccggctgccttccgaatcaatgcgcgcgatttccatgccatacccaggagataatgttaagttcctggaataaggtatagaatgccggtcggcacctgaggatcggtgccttcgctactgtcgttgctgttgcctctgtagcttcttcgcttgcttctactgacgtctctctcggcgtgcatctttcaagcgttgccgctctaagttactatcctgcccggctcctgtacccgcagacccaaaccgttctctttcaccttgcggcgaacgattgctcggaataaaaagcggtgacattagcaaatctggagttggagatctacccgctgtgtcgttattttcatggggtattgacagcttgctgaagaaggtaaagtagacactcctcctcaccaaagtagaagtagcttttcgttctctttagagggaatcaccatagagttagtcgataaaaaggaattgacaatcttgcaattaggcctcggcttacggatatccacatcgagtctctttcttagattcccttccaccaacgaattgtgccggaagcttatggtcaagaaggacggccctcaagaagcactcgctgactttatcgatcagagactcaatttcttccctattgtaccgataacgatctggtcgacgggctcttaaaagagcatcttacgcaatttgccgatctagcgactactagataagctactcaatttgtggcgaccaaaacccaagtctctttacgagtacagccatctcatacagtatcataggctccaccatctcccgattaggcttcgccgtaggatctttcttctgtggctttttagataactttgggtagtaacacatagaatagagccagagttatcggtatccaagttctgctaggtccacctaggagtgcaaataagaccgaaacccagcttctaatatttatatcaagaactgcgcataggtgggatcaaaagacataaaagccgcgcgcatagcggttctaatcgttaggaaagatctagaaggtgtgataagtcgtttgatacagttcacgcacaattctaggtaccagagatctttaaagaacgtatacagagatggaattataccctctatcctcttcaatcgcttccaaattaacgcccgctcggattctatgaagtttaaaaagacttcgccactgtatacaaggcctttcacggtagttctatctttcgaggagactccaggtgccaggagttgcaatgtttcgaccgtataagggtcaactttgaacatcttagcacaatcgtgtcccacgagtaaagaccagtattacagtagcctagttaacacataaactatctcctacaaacgtaatcagcatctattctttttagagtcagacaaccttacctcatcgcagcaaatagccagagcctacagaagagatccgatttatattccatatatcaccaaggagggcaagacaagtaacaagtcaaaagcagctcggacactcggataagactctagtccacaaagccgcctagctttattatctaacagccgcgccaaccatcgattctcgaagtatgcatttgcttcatttcgatattatcgaacttttaggtaaatctcaccatcgcttagaactctctcgttagaatattcatcgataaggcttatttaaagatcgggactaatgtcttagggctatcaaaactgcaggaaagcatatggtagatttctggcttaccatccaaatacaagtcgacagtccaccattagtcgatcgatagtaaatagtattctccagcctttaatcgatattagccataaaggcactgtatagaaccagtagagaaatagaggcgtaggtaccggctcagttaatcagtcatcatatcagcggcatttactcgtcctgcttaaagagcctcatagagatactaccgtgacacaacagcgctcacgtggttgtaaatatcgagtcttcgacagccttctttatcaaatatctcacagagtctttctacattttttatattcatatattacgagatagatggatatagggtaatctagctaatattaatcttggctgttccttagtaagtccgacacctttctatcagaacctacagttcagggtctatatacatagactcgtccattatattagtgaagcagagtctacatagcaggagagtatcggttttttatatttaactggtcttagcctcacagaagaaagggtccacctagctgattcagcgtcctagtgaccaatataactgcaaaagctaggggtggccccaagacaaatttagttcaatagatacaattgcattataaatagggccctcttcgccttcaggcgctacacttttccgcctcattttccttccgaccattttaatctggcccaaatatatcgaaacaagataagcactgcacggcacttaacttcaagagctaccaagaacggcttgcgaataacccatcacaagaagcacccttaagcaaacagtcacatcagcttgatacacccgcccaattagacagtagttccaactcgaaaaagagaaaaacgtcttcccggagcgaacatacacgaaaggttgtaagtggaggcccaaagcgccttatcttacctcaggtgtacgaggaaggtatatctcgcgggttaatcgtgagggaagaatcaccctaggacacttatcgtcggactctcaggtataatctagcaggcgaggtattcattacagctcgccgttcccgtccatcccaggtagtagccattcgaaagtacaccaaaggggacataactaaaatacgacagctatttggtatccttaaccacaataatatactgacagcccgagagtacttcgtcaataaaggatacatatatactctcgtcaacaacctccagctcactttagagcaacttatagggtatcggtctctttatcccacagaggcggaattagcttccatgatttagcaggtatatagctcttaacacttcaactatcttaagctcatgacagtgcagattttggatggtttatattacctcaatgaaactggattagaacatcagtctctgacataccggaatattcttctcggcctagatggtattatcaagattggtaagtggcagttgcctcctttataatgatttttctaactcctatagccagcttagagatgtgtgtggaatatctaccaggtcaagcacagaacgtatacatcaaaaaactcgcttccattaccatagagatcatacagaagtatatgaaagataatggaatggtgggcatggataacgtggatcgttagcctgtcgactcagacgccttcgggtttctttccgccctctcgacagcaaagtctattgattctttgaaagaggtacccaagtccccatgtcacgagtagatgaatataacactaacacttatcagcaaccgcttgtccgcaaaaagaatcaattggtaggagagttgatcctgcttgctcggtctattttagtctccgcaaggatgttctattcctacgagaggtagttcgaaacactctcagggaattgtgaattttggcgtgctcatggtttccaagggatccatcatatgctcgtacggtaaagacctgttggcagctccaaacttagcactgcataaaataagaacctagcggtgctatatttgttactgtaggtcctaaagcagcggctagatcctagttattcagaatatcagtgcaaaactaatggttaccagagttatgagtaaaggagatcttgggctcagaatctcatctaggaaattgagatgggaatgaggcgccatttctaaaaatgagacgtaactgccacataagggatccatgctgcaatggatttcatatgtgctgcgtgattgactcatgcagctacgtgatagactcatgaccggcccgccgggagaccacagcggaccagaatcctctaatagaccatgatttttaccacgaatttatgaatgaacttagggacagggacagggacagggacagggacagggacagacaaattggtgtcatccgcaaccatcaacccgcgcgcgtatggggaatacaaaggattggttggaggacatggtcgaataactttagtcagcaatcgctactcggaaaaggccccaccctctggggcatggttccctacggtctaagagccagagaaaggcgatggcatcgtgaagataatatatttgactcaacacctgctggaaccgaccatagccttagaatctctggcgaaagattaggtaggaagcggcaagtctagaaagggatttgaggttaggaaccacccatctttctagcttacatgggtttacttcatgctccacgagcgcttctaggaaaatgtttagttggtcccgggaaaagaccttatcacctccaagcatgaggcctactgccataggctcaaacgatcgataaaaactagtcagagctaggtaacaattaagaacataaacggccaacgtgtctaccattttattctaaaaagctgttcttctgcctctatttaaaagtcagcaaacagccattccgtagagtataaataagcatacatttgatttaccaagtcttcactagctagtaagatcaccccaagccccacacaagtagcaactttccaccaacgctcgccccagcggcattaatcgctcaaaaagtcgcgatctactttttacagaacgaattggctcccataaaaagcctataagatagaatctctagctatcgtggggattgcccaaccttttcggttaagcggatgaccgtttttctcactttccttcaaatcattagcatgattttcgaaataaatatagatccaaatctgcgcaaggcggcgattcacatcatctaatttcgaaactgaaccaatgaccgagttcaggtacctcagatataccacacatgccgccagagacgaattcaagtcaaacatatcaacactaggtaaggtatgcaggtgacagtcgactaaaagagactttaacgcagcaatctggccggatcgcataattataatcaaactatcaccacagtcttcgacatctcgggcttgtctttcgctcagtatctcgccagttgcaatctaacatattatcggaatacagtcaacgtactcagctgcctaggtccggttatcgacatacttataattgtgaaaggttcctttttcgatctcttgtacttccagaaacttaaaatctggtaaagtaagaactcttctgtggttataattctcaatgccgaaagcactagaatgattttcactgggctttgaatatttaggctatcctttttcgttactcacaaggggttggatttctgtgttttcacattctgcagaggcacatgcgcctaaagttgacgttcggagacatattatcattatctctttgttattatctatgggctgcgtcaactgtaaagttccatccgatagcagtgagacttctagctgttataaatgaagctgagggacatatttcagtaaatgctgacgctcagtacagtcctccgtattaataaagctgcattgtgaggtagccagatatttttcattctagagtgcctctgaagtgagccagacatcccaatcaacagggtcatcatcagagatatcgggtccaggggcgccgtgagagactaaagtgtctgggtcaaataataccatcattcatatgctagttaacgacagcaagaaatcaatggtcaacttctcgcaacaggcgatatctggatagcagaagaattgactcatgttcagtcaactaaagagtgaagaagaacgttcactgaattcgagagagctggatacataaaggaagaaagcgaatggcaagaaaaaaaaaaaagggcacacagggattttaagcgcctccaaaaggcgcaccttaaaaggtcacaactgcgtcccccnnnnnnnnnnnnnnnnnnnnnnnnnnnnnnnnnnnnnnnnnnnnnnnnnnnnnnnnnnnnnnnnnnnnnnnnnnnnnnnnnnnnnnnnnnnnnnnnnnnnnnnnnnnnnnnnnnnnnnnnnnnnnnnnnnnnnnnnnnnnnnnnnnnnnnnnnnnnnnnnnnnnnnnnnnnnnnnnnnnnnnnnnnnnnnnnnnnnnnnnnnnnnnnnnnnnnnnnnnnnnnnnnnnnnnnnnnnnnnnnnnnnnnnnnnnnnnnnnnnnnnnnnnnnnnnnnnnnnnnnnnnnnnnnnnnnnnnnnnnnnnnnnnnnnnnnnnnnnnnnnnnnnnnnnnnnnnnnnnnnnnnnnnnnnnnnnnnnnnnnnnnnnnnnnnnnnnnnnnnnnnnnnnnnnnnnnnnnnnnnnnnnnnnnnnnnnnnnnnnnnnnnnnnnnnnnnnnnnnnnnnnnnnnnnnnnnnnnnnnnnnnnnnnnnnnnnnnnnnnnnnnnnnnnnnnnnnnnnnnnnnnnnnnnnnnnnnnnnnnnnnnnnnnnnnnnnnnnnnnnnnnnnnnnnnnnnnnnnnnnnnnnnnnnnnnnnnnnnnnnnnnnccccctttaggtgccgcacccaaacggcagttaatcagttgaccacggttttcctcatggccacagttttcccaaccagccaagaagacacaccgttgaagcatattttgccagtcgccatgccctatgaaaatcctcgtcaacgtaatatcatggtcatggtcaaaacggaatacacgctctctaagaaaccgtgacgtgaaccagggttgaaacagacgccggtcaggaaatggtgtacactttgtttagaaatcgggaggtataccataactggagtaaacaggagctgatcacagaaacatagagtatatgctgttccttggaccaggaaacatattgatgaattgaacgggtttactgtgacggtgaagtgcaatagttgaacagtagaaagggctgtgtgttttctagagggcggtgaatcaacctatggtcaatcggttcattcgctggacccacccgctcatctccccatttctcagattagtcccttctcgttacagctgaaactccgtctcatataaccttactctctattcgaggtatttacgaactaattctctcaaacgatctcgtacgtcatacaacgcggatactaggaagttagcgcctggtttgttattcaaagtaatggacttacccataaccagaacctcaccgcggtcttcataagtatttggcagccgttttatatttcgcccggaagcctcttctaatataatttcatcatatcgaggctttccattgaaaactatcgcgcggcgatgctggccgaacggcttgccatattctatcatttagtttgataccacgaaaaaggacatttcgagtatctatatcatattatcagcgcgagtatggttaaacaagaagagccaacccacatagccatcatccaagatatcatcacttaacaagctgttcagaagtagttaggctacaacagcaatatctgagaaattcagcatcgttagtttactctttaaacatagaggccgaacttacccaatgtttacacctcccatacgaaatgtacccggcgcacatgtgacatgcaagtgttatacccatagaggagctttttaagataagagatcacacctactataccaaaatcggtcgcgactgccaagacgcattcgtaatagtctacagatttgctaactccatacagcccgctaacaaatgctgtcaaggaagtatagccatccagggctatacgatagtgaatagtctcagtaagcccttttcgagcttaaacaaaaagctccaggacatcctacttttctagcaaccaagatatcaccataaacgggtatatctgggcccaggaaaataggcttatcgccggtatccagagacttatatattagcctgcctcaacatataggggccttataagtgcaatccttactttcagtggtattacctctttgctctgtattagtatttgttacacccgatcacatctaatagaggcacaagaatagggacatagggggaagacaccgttcctaataataaaaaggaaaagttcgaccagcaatacaagtagcattatgccaagcggaatgtaaacatacagccggggcagcagagtaccggatggcagataccgccatacagaatatatgcaagctatagccagggcttagtgcagtcgaaggaatggctcataaaggaaacggcgaacgaaagggaaggataacaatagaattgcagccataatcacagagccctaagaagaattagcgctactaatctaacagggtaggttaagcgagagcgatgacaaacaattaatacaaagaggttaggcttctcgcgaagtatccagctcttccgatcagttatcattgccatgatgatatgtaaaccaagaagaatgccagtcatccaacccacagcccgatgaatgcgcttacacgtcatcaaagaaatacccatagcgtttgcaaggaatcccagatggtgtgccaagaacaggaaactcatgtttatcactgaaagggttccggcgcggtctctagccattgttattaacggagtcttgaagacaacaaggaacacatttgttacagcgtacgcgagatatgacaaggcatctgctcgagtgcaaggagcaatcagcctatggcgaccccacaagtacggatatgttaagtgtttcgtaatgaggaatgacaaaactctgagtagattcagaaaggaaggggctatacgaatgagaaagagcgttgtcagtaagcaccccactgcaatggcgtaaaagatcgtgatttccattgccagtcaggacttaggtatcacatatttttcaaatattgcaaggaaaccacggtgctttatacgcccaggatagtaaacttcaccagtaggatgactaatctttataccagaaacaacaactcgttcagcgttaccacaggcacccatatcgctgcttggaaccgttgttactctaaggtgtagttatatctctcgtgatatagtttgttgcagggcggctcatctttgtttccctgccccaatttagcggctcttcccggtcaagcatcgagcttcttcctgctttattcatgaaactcgcaatgacattgtggactactgtggtatttggcttggcacaccctctgatatacttcttgacatagcaactacgagagtgaaaggaaaagcaacaaccgtttttcacaaaaggtctataggcaaaaacatactgcaagacgggttgtaatacacttagtatacggcactgcgttataaagtgcctatcgttgctccctggaaactgtctcctccctggttttctccaaatcacgatctgtcatcacagttggagtcgggtaataagagctctggcaagtcagcgctccgcctggtagatgatgccatgtagtttacataccaattgcgaaataagaaaagcccaaaagcccgaagaatccgccgacaaaatatgcacctgaccagtctcccgttgctccctggaaactgtctcctccctggttttctccaaatcacgatctgtcatcacagttggagtcgggtaataagagctctggcaagtcagcgctccgcctggtagatgatgccatgtagtttacataccaattgcgaaataagaaaagcccaaaagcccgaagaatccgccgacaaaatatgcacctgaccggtttcccgcatgcgaatacctacgcatacatctgcatcacacatcttgctatattcagatgcctttttcagcatatttgccttgcgacgatactgtttttggtgcatcaattttctcgtcgatgaattcttggatcgcgtagttttcaaagcagccatttaagctgatgtctttctcttttgaggaagcgacggtctataacaaatgagaggctgaaggtggcgcttgtaaaggctgattgacaagagaaactcaataaaaacaggtgctatgtactttaaaatacaagtacgaaaagttgattttttgaacctttgaacctttgatatgtgaacaaagaagccacgattttctttgcgtgaagggaccgtggtcttgtgttgattaacgttatgaacgaccactgaaacagcaagttaaccgccatcgtaaaactgccgtcaccatataggggttgcagccctctttcacaggcaggtatggcccaaaaaggtgctgcaacgattagactgttcccccgaatagtgaaggccgcgggacatcgaaaagtgcgggtaacatatggcttggattggttattttggggagtggatcgccgtccccaaatagtagaggcagtgaacaccaaatagtgtcggggagtctacgtgtatacagtaacgaaattagccattttttcgtgttgtacaataattagggccaacacggcggaatgctgtggctggcccacctgggtagattgcgttactcaactgtgctctaaaaatgtttatgttcaccatcgatagaccaaacgtgaccaattaacggtgggcatatcacaacaatttttgttgatgtgttactacgaacagtgcggttctcttctgttaagggttcaacactgacggatatttcggttcaaactaattaacagaactctaaacatacagtgtcaaacagacattcatatagttgattattgcgggacgattttgataaaccccacaagtcttttactcatctggtcaatttccattaccatagatattaatttggttgaagagcactgatctaaagacataaaaagctgtcaagtatggattcaacgagatggtcaacacatggagaaagatggcgggcggtgacgttgcaatcaaatattccacaacccaggtttaaacagaggctgtgaaagcggaagctgctgttgaaaaaataggtgcaccttttacttaaggtagtgtaaataatatgattggccagaaagtagcaaatcctccacccggtcatcagatcatgtgcagcccccgataccctggtacaccccaggtctacagcaagaaaaaatttcgaccctggcagtctatattggattagatcggattgggccagttcggaacgggtcggcccggttaagttaaaggtctgggagccatcatgcatgctgttaagatttcgaaatcttgcatttttggaaccttctacggtaggacgctagctgtccccagatcactctccaaaatctacttatgtgtcactgtgcagcgaaaggccggatgtgtgaacattcgtcctcaatatacacaagtatttcccagaacacgtgccgtcgaacatgtgtgtatattaggattttgaaggagagaaccaaccttggacatgcccctggcaaaacatcttcggaactcttcaaatgacacgggcaaagctggtatgacaaatgtgctgtactggtatcaccaatttaggtctagtggcactctgaactacgctaagggagaggctagccggatcgcgcaggtctgactagaggagtcgtcgcccattccccctccactcgtatatacaactggtgttggtaggtagtaatgctactagaaaccaagtaaatttgtattcttttaactacgtctagcgatatctattaggcacaaatcctagggtatcgacaatctggagatacctaaggtacaagatggtacaagatggctcccgtcataatgtaggtgaatacggcatataaacctaatattaaatctagcgaggcgttaacatagtgtataccactcatcaggcaagaattaccttagcacgatctttaagagacgctcttacttgttcgtaaataggggaatgcagaaggaggtagaaatattccgataagtaccctaatataggttagtaggtcttggcgccaggggtggcgaaacaataaaagaggtaatgacaccaactttccggaagtactgtatagggccgaatagttagttctattttgtgactgtcgaccttcgactactacaccgcctatattcccacatattaccaatacaaggtgtttctaaacgagtcatcgaccttatttcgtatatatatctccggtaacagctagaatcttctatacaaacagaagaaatccccacaattatccaaatatcccagtctctttaccgaatggctagttttgttcaccgaacaaatgtatatatagcgaggcccgcacaagctaacgtacgttcgtccttcgccgtacactttcgctatactacgccttaccctctttccagccactagtagccttagatatacaatatgacagtaagaaagtccatagccatctgaactagggctttatcaatgaatacattgcaggttaccctctctcttgacctagcaagcatacgacctattcgccttgcaccccctccggatacaccaccgaggtgtactagatgcgattgcctgggcagcgaaaaaatcacacgtaccacaaatcgccaaggaaacgctggtcggcattattataaataccttccttgcgacaagtttctttgctttattgatgaccgaggcaatgatccaaccaacccatcctgccattgcgaagtatccagcaagacatacttggcaggctctgaaaaacgcgttccacggggcttgttttttgcttgcaggctaggagcgtgcgacttccaccaacccttcagaaatagtcgagggcagcatattactgtctcttcctatgacttagccgaccatttgatcaaccttcgtcttatttagtggtttcggcaataaggtaggaatatgctactgtctttttttcaattgtagcttgtaggctattaatgctaagacgtttttatagcacattcgataaactaccactcgatcttttcaccctagaagaggcgagcttcatctatcgaactcctttagttctgtaagagcaaatccagcattagaatcccggcctatcttaaacggaaaaaggtggtactaatattttaaagtgatatattatatcatgaaattattggatataaatatttttaaagatacgtatatatgctagatcaatatcagaaatggatactatcatcggaactaaaacttccctaaatattatcaatcttctccttagacttctgaagtttgctcttcaagctaccaagtcgggatttcgctgacatatattgatctatttaatacgcagatagaaggatattaaaaaaaggatcagaaacttcgatatttcgtatatcctcgctttgcgcaagctggcgactagtgcaagagatattgttccttttgaggggcagcgcgaacaatttcctcgaatgattggattgcctgaagagcaacaaccgagactctccacataagatacacttgtccttcgctctgtccatcgatgagctcccactgaagacgaacattggagtcacccccaggagctgatacccttatgaagtttagtaccccagtcactatggagtaatccagccagagattttcttcaggaccaggtataccgtagacaacgctacattctaaagagtaccgaatcactccagcaaataccccgagggtatctccttcctaaactgaaatgatgggacaaactttgagaaatacatcatctttgggttgaagggtaacaaaaatagacttgtttcgcgttgtttctgcctttggctgcaggtcaaagaacccaccaagcggtatagctgacggctcgtgtgatccgctcaattggaagatagtctcctctacgctggagaaccataggttgatagcgctgttccacgcaatttcaggaacacttagtctatctgctacaagcggctggctcagccatagtcttcctatgaaatcacccttactctcctcggccacacgctcttccagctgtttaatatggaagccatacttttcttcctagtcccggaccatctctaccaaagaagccccagcttctgatgagtagcttttgcagaagcggtcgaattcctttgtgcgatacaagaggattttgtcaacacccgcgttccgcatctcgaatagtcgtttccagaaaagacggtactggcgttgattagcgaggctaagtccataacccgcttccttcataaagcgctcggtggcgaccttctcggccatcgtgaattcatcaagagggcctttggagattagcaaatcctttaggtcaagaagctcggcgcctttcttaacgatttcccaatacacggtctcgttgaatcgagactggatacttttgcttgctgagaatgcattctcctacttgattagctagactgcatctgggtattgcaacttgacaatatcatccacaaaactctggatctctttaaccttcgttgtcatatttgcctgctttgaccggtgcccgtatcttccaagtggatcgttaagcttaatacagttgacaagtatgttctcgacgatactgtgcggcgctttctcgcctcgataggtgtacatgtcagtcgacatcccagcctgaggtatgctcatcgctgcgttcgcttcagccgtcgatggaggttcggctggtatgtccccttcccgaactgctacggcgtcatccgcctcttgcgccatatctttggtagtagccttgttcgctttggctttgtttctcttcttcttgtgagacggcacatctagccccttgtagtccgctctacttcgtttttcaggtgttgggaggaaccggtaagaaccacgcgttgcctcaggattcggactagctctgggagtaagaagaggtggtagatctgttattcctacccgcagtctcatttcgcggactttgaatgtcagtggaaatagtctcccagacatcaatccaggggctcaccaaagtcagaaatgcctaggatgtgttgcttaataggctcatcgttgcaatcgccgattccgcagattataagcaactcctgaactttgcctgccgttaaagactgaagattttcctccatggcggtgttatgctccagtccttaccaagagaagtcgaggggagaagtcgcgctgccggtattttcggttgcgcgggtaacactaatccgtaataggaaatataaggtctagaccgtggctaccagaatgagatggaaaagaagggaaagcaggaatttgcgggccaattaatacatcaagcctctctcctatattgaatgcttacgaataccacacgagagcttcattatatctctcgtcagccttagtctccaattatcacagtcgggtgcctatatattgctgtatggtgtttgaagtgacgcgggcaaagctagtatgacgtaaatatatcaccgattacggtctagtgggactcttaactacagaaagagaggggctagccggatcgcgcaaattcgaggtggggcgttaaggaaagtcaccaatttccacgtcatatacatgcagtattgctgctttaaatcgagtgcattttgtactcttgcaactgcatctggtgatattcatgaggcacaaatcttatatctacaaccatgcagagtactgctacagtacaatcctggggtagttagcggcaatctggcgatgcttgaggtatacgatacctcctgtgataaataggcatccaagtaatagggcatataaacctagcagaattggtgtataccaccaatcagacaaggattgccttaagaatatgtgacaagttcttcgagaaacgctcttgcttgcttgcttgcttgcttgtgtataggggaattcgatgctagtctgcgcccttcagaatttctatcatagctgagatcagccacctatggcttccccatcatagagttttgcttgaccatagcctcgagtacttccttgccctcggtcgcctcatcctgttccaaagggtctagcccatagcaagccatgaacttgagccagccaccaaattcgttgatgatttttcgttcggcaggagtgacgggtggctctgttcgcagttagactttcattattctagtagataggtttcgagagcatgaggatagccgtacgaaggggatcggggttcggcattttgtagcgtggatgtgaataggcgagggacagtttggaaagtgtcacgacgatgtacccaaattggctttctactccagagccctaaaagatggaggatatggtatgaccggtagactgattgccagttgttttgaatgaatgatgacctcacccaagcataacaccaaccccgctccaaatgatgctgactaagatgcgccaatggtgcagctaaaaatagtctagctgggcccttgcctgtggtctggaagatcgatattcaacctatgatgtgcgctagatgcaaatcttactatcttaattagacttacccgtccactcagcaacagtgaacctgtataaatgtccaaatgccgcgtgagaggtcaaaccgtccccatgaagcgaactcactatcggcttccaagaaaatccctccagcctcttgtacatgactgtattgtataatttcgcgtcgtaagatgccgtatcctaccaaggcatttgatgcggccgtcgaataaacgacctgcgctgaggcattggcagtggggccagaaatcggggttatcaagtgttaatctgtcagggcgatttcgagaatgactgtagaaagagctagaaaacagatattggtggtgtagcagtcgaagagccaacaatcacaaaatggactacagaacttgatatattgccgcatagctggtgaaaagcggatatcctgcgatccaacaataagaactgggatcgaaatcagttgtgcccaagcacatagcccaaaaactttattctcgtctaaacgctccggaacaaccacagaatgggcaataatgcatccccccagacttgcaccaggaccaattattagaacattgagaacagtaatatttgtggtgatctttggtcgaccctctctctccagacagagatgtgacgagatcggcggcaaagccgacagtttcctcgaggacagaacaaaacctttcactcttcatcagttcaacgatatggtcccgtgagatttgcaccagtagctctcggagatttcgatcatctttctgagtacattgatatgcctcagcaatggcaacggggaaatcatccatctgccaacaggttcttgcgatttgtccaaacttctctttggccctttgcttgagctggggtacaaaatatttgtccgcgacctgatataacctgacattgaagatcataggagaaacgcggccaagctcgttaccgctgctatcatagtcaatgccgtacataaagtggatcattgcctcgatagcgcgaggatcatcgtcattcaactggatagtattgtcggccgtctcctatcatctaggttagaattcagaatgaaacctcgcctgtggggtcgtactgcccagttgcccttgtacaatcgcgcaaaatattcagactgcccacagacgattaatctatgcaacttgaattcttgctcttcggttttgataacaaggtccgaaaactgagaagatatgaagaaactgcgacctttagctcgaaataactaaatctctgggttaaattgccaacctctgtatgctagcagttatatcccccacgacttgaccagggtccgttccatggccaacaggaattttctgaatctgtccagtcatctcttcgggcatctcgatctccgcgtgaggaaccgtgtgtatgctttccacacataagctgttttcacggagagccttcttattgtttctcttcatgagataactgtaaagtatgaaccacgcaatgcgcttaggatttgcaggaagggaggagggagggctgaggagcttttcataggaaatcaggtccttattcctaagtgattacacagaccgccttcatgcatatgaatgtaagggtgtgtgatgaacggagccaccgaaaaggaccgaccagtcttggaatctacgtgtaaccactcaatgtcctccttgaatatatgggcataccgccccagtccaacctgttaggtgttcagatcacactcctaagcccgccagcggcccagggccccaggcgcatccccagtaagggctttggattggtgtcaatatcgataagtggtgatttcctccgtcgtctgactctccaggtatacgcctcagttaccatggagatcatgcagtttggggggttagtgaaaggcaatactggcactgaccaaatctgccagcttacaccccccagaatacaatgatataggaaaagtttagacacccttctgctaccgccttcctggagactccttaccgccctgtatccgcggtcttttattagtgggggactggctggcagaattagggggtttcaaacttttgcagtcactgtatcaaggcatccttgctctacattcagccacagcaagtgtctgcagggcgtcttgtcacacatgcactaccgaataggagaccactgcggtagttgtatttcgaaattgacccacttcagcagcaggcaacgtaaacaatgggtgggaaaacggaggtgatattgtatcaattaaaatttaagtttttagatgtctaaatatgaggctgttgaaagcggtgagaaggtcgtttagatgctgtcctctccggagaaatcgggttgatcgaatcaccttctccacctagctgtggtactgtgaacagcattatcaacgtgattgtctgcttgcttccctcgacaattttcccactatgcggataggtcctgggagcgttatcaaacttggtttgatagatgaatgcaacctccggcttcatatcggttatagaatttgtggaatctggtcatggtaaagaaccacgaagacatagtatgagctggagaactgggatgtcaaaatgtggttagcgtatctcttactcttgctgagagtgccactagatcaaaacaggcagcatagttgggttgtccttctctgtcaccgctatttcctgctattattctgccgcaccaaaaattccattcaattattcaattattgtaactaatattcagagtaccatccattagactcagtaatagcctgcatccaacgtggcacgctctctgatagaccttctcggatatctaagtcaagttgctgcccggcccatctctaaaacatgttggggatcgagccagagcaatgacgtcatttaaccgtattggtggtgatcaatgggctcagaggagattcaggactcaaaatagcctatctgccctcaagaatgcaagggcttagcatatcaccgctaacgcaggccaactcgaacactactaattcggaacataaccggttcggcgaagttgagtgttgaagtcggcttgtcaaaagatgaggctatatcatatcaccatatacatattctacacccaagtatatctagctcattaatcaggatgaactcgttttgttacaggtaaaagacgcaaaaagcgaaagataatttgacttaattcaatttagtaaaaccctcataaatttagttgagaccgatatattatctgcggctcgaattaaggggtgcgggcgtgttgtagaaaataggtctgttcaaatttcaaaaatccggatgaaagcaggacttcggtcagatgcatttccgtttcaagtgcaacgaaaatagaccgacctgaccgcaattaattcgtatggttcacgatcaacaggggtggtcaactaatggtcaacgtgaggaaaagcaatggcgggtggtgaaattgtgactgaacgtccaataaaccaggctttttcaagagggcatgcaaaagtggtgtacattactgtacagcgtgaaaagattggctaactgagagctcctttcccacctaaagcgctggtccgtgcatttcctaataccctcgtacccccgggtcgctgacaagaaattatttcaacctgctcgcctccgcttcatttcgagccctcgggtgagaccggagaacttgaactcactcttctctcgtgtggttcgagtatgtatactagctccaatctctctatccttgtttcccaaggccccataccaagcgcgctagattgcattagggtatctttccgctggcctcggatttgtccttctacgaaagtcgccatgaattacagttatgtgatttctgtacataaccagtgtcaccactctccaagtatttctcagatcctaaatacttaagcactctaagccactgaggcccagagggtaaagcacgatgacttgtggttccaaagggtactcaagagttcgctgtaaattccgaagacattcacgtctcctagtaggcctgaggataagggaaagtagatagcctatgtagtcagcttatcgcgtgcgtaattcaaacgtggtggagacaaagtggcttctagaggtatggaaaggccagtacatgaattaatgggaagcttgcgtaaagtgatgagggtgggaaaagtgttggaacgaggcctggaaaatatggcagaaataggcttggcacggggcttgatcaggacatctctaacctgggtgaaatgaattttttactgtagacttggggggtgcctaggtattaggaaaaatgcgctgatttggagtggagacagttgtctagccaatgatattcaataaacaccctacttctttcagttatttaaaatgaaaatgaattatttaattttcttttcaatcctcacatttctgacaaaacgatcgtttaatcaacagctgcaagtttgcttgccgttgggcctcgtttctcaccactatggccttgtactactcgtcgatgtcttactgactatgtgtttattcacgtttattctactgtactgattgtagtggaaagcgtcattaatattgattgtacttccggtcaactcccaaataatcgttggttgcaagttatttattgttcatcaacatcatgtctcttcaaccggtggctttgcaattagcccgcgttttaatttgcactctaaatattgattgcctataccagagctcactttgtatctcgcgagtgggaccctcacttttcaccattgtgactctgcaagcaatttagctatcccccactcaatttggttagcgtctttatctccggtagttcagagtgacgctagccccaaactggtaattttttaagttgtggaccgagaataggcaaggaaagaactaagaacacagagtatatagtatttgcagttgcgaggcttggtcctgcttcattctactatcatcataaaaaaaacatcgttgaaagtacaaatttggctagctgtctttctgtttcctagtgttccatagcctttctgtgttcctaaatctgttgctctttccatctgaatctagaatatcgaacatgggagtttatattgccgaatttgggttagcgtcactatgaaccacaagaatagagacgctaagacaatttagcgtaaaattagaaaagacggcaatagaaaagcgaagggtaaccaggcaaagataacgcctaaagaaacttttcatggatgttattgagcaatggaatatataatgataaaataaaatgcaattgttatttgagggtcgatcaaatctgcgttttcaatggagaataaacgagaagagacacacagtgagtgccaaggctgatacgtgaaacattggtcgatgggcaagaaaaaatctacaaccagtgattgattcaacttggtctgttgaggtgaaggtgaagaaacccattttctttgtttcatagagtcatactttgattacttgtttcagatcacgtttcgcgggtatccggtatctatcaggccccagggcctatagctgaagcggatcgccccgtcctaagttgattatataaagcctacttccaatctaggcttagtggtactctggacactgctaagagtgcttagtaacagcgtgcaaggttgactcgagtgatgttatcaaaaatggataccgcgggttttcaaccaaatgggtcttaactgtagtttttagacattcaaatgccattaggtatccctaatgactcaagtgttacacacttttgctgtgtctatgaatgctttgtatatgggatgaccgagaattcctacgggggtcggtggaatgattaaacaatggcaaataacgtgaaaggcagtggcagaacggcgtgcggaataggctacagtcaaacctggataggcgcggagatgacaagaacctcgtccagatcgccgagtttcagagcctccaaaagccaaccacaccgcttcaaccccccccaccctgggagcaggaagttaatctagctaaattaagcctagcgcaattagagtgggacgttgggaaagaaagcgtgtgggtctggtggagaatctgcttccgaaatccttacggaacattatataaggcagcccccaccacccgtcttcagcccgcaattgagctctaacattctgccccgcgttaccactcccccagtttgcgacaaatcgcagtggtgtaaagtcgaagagaagtttttcattcgtcactctctcaggatgtccacaccaaccagaataattcgtgttgaaaacaaccctcagaaaataagggaaagtggcctactccagcagtatggttatgagattgtgaccaaggaaggggaaacatacctttctcctaatcaaactgatggagggagagacaaccaaactgagctactcactcaaatggttgacttgggatacaatctctcgataagtgggataagtggagagcgtgtcgactgtcgatatgtggtaagagcccttttccaaggttgaattcacaggtttaacaccgatgcattttcagggcaacagaacggttagctaactaatccttctgtgacgacttctattgaattatatgatataataacctgggcgtcaatgttagttgaatctgcatttggttgaagcggacagtcaagagttgattatataaaacatacttccaatctgagtttagtggtctcttctcgggctgtgccatgtgctaacaaacttaatcgccgtgtatgggcaagatagatgagtggcaaatgcaaacacacttcatttttcggaaaaacacctcagccgggatccgggattagctgacataagccgactggacgcaccacctagttaactatccagggcttgccaccgacatcctaaactaatgtgtcgacttggacaaatccacgtgtattatcgtcagtttccagcgtctggggactgagtggaataccgggatactcgaatgcgcatactaacgcattcatgatgaaaggattgattgaatagaaagacatgcgatcgggggcatgttgaataccctaggtcaatgctaatctttgctagcggtaagttaccgctctaatgctctgacaaaaatcaaaatccgaaaatttagtgccaggatttctccgtgtggctatcatttgagggctcctaaggaactcattcattttgccaagttacccttgcattgtcgccacgtcctagcgcactatatctattgaaggtggcaaattctgaccttgggattttctgaacaactcaaaggcaagtaaaaccatgtcccttttggcccgaagcatagtgaatggacgccgtggagtggcttgctcgtatagagcagcgctgcgaacttcatcctcagtgaaccagcaatgatcaaggtgctcatgactgatcttgacggaactttggccgaccggctgttgcatctcgctggaccagattcgttgcgccatcgtctcttcgttgtcgatggtggtgaacccgagcgtgcgcatgaggactatatcgccggtttttctatcttcgtgatagaaagaacacgtgaaagcattgccagcaattctcgaaggccaaatttgcgtctcctccccgctttctcgggctgcggaatggatgatggtcgggtcctcctcgtctggggttcctcctcttgtctcccaggtattaccccatgagctttccttgccgtttcgcaagatcaacagaacccttagcttggatgggctatcggggtggtaggaaaatgtgacagccatagctgtgaagcgttgaatgggatatagttctttcagacgatcgagaggaatattgagaatggccgcattgacccgcttgggaaggcccaaggtggaccggcgttgtttagtgtagtcgacatagctgagtatggggaaaaaaatcctggaccttgcgagggtgccatgacacttatatattgccatcatgtctcttccagcccgcaatttgatcgaaatatggtattacgtgagaatacaagaatctacaactatgttgcctagcctcctgccaacgaggatacgcatgcttcgatttccgcgaccgaattgtttagtacgagacccgagagcctatcatgcagaaatgtatctttacctcattgatatcgcagggtgaagggattacaatggtaggatgtactgcgtcgtgcaattctagtataaggatatagattcgggctgagtgcttctgataccaaaacgactaccacaccaccgaagtaagttacgcgcagccaaataacgcgcagaaaatggaaagctgctttagttcgtgagggatcccccgaaatggggttgactcatccaccagacccgatggagccgcttacgaaccacctattcttctgtgggcaaggggcaagaaggtacgtaacgagagatacaattgtatagactaaattgaagtattggaagaaaatagatgggagacaaaaggacgtccttcaacataaagcattaacgagtcccagtagggttgccctaggttgctgccaatattgtggagaatacggcatttcgcacttggcataccaatggtctcctccatcccgcaaaagtccagtcataagatatttgccttcgacgacctgcccttttataaggttggcaatgccctgggccttgacaggctgccctagttgtaagacaagcctagttaacatcccctcctcggtaatggaaaactcctgattttgaagccagcccttcatgatgacagccattcctaggaaaatagacctcgggtgtttatcgagaatccatagacccgcgtagatctcagcaagcctaagtttgtctccacctcggtcaagcgcataaaggcgttgacaatcgctgtgtgcttccttcgaaataagtttgtaagaataacctcctatgggggcctgtctgttcgtgcgcattatcatcaagtctatcacatgtcagcctctagctctagcttaacaaagtcataacacgcttcttaccactagggactagatagagacccggcttctttgagcatatttcttctatcttcgacttccgggaaattgaaaaaatgggttgcttgaatagctcccaaatatggttgcagctctcggatttcagaaggacctcgtatatccgatcaagtgtaaaatgcgtattagtgctgcttcttccggcgcacaggttccataattcgtcgtcaacaggctcatacagagggcacttctttgcatcgagttttatgataaagtctgtaagttattagccgatatggcatcgcctagcatgtacaccctttctgaccatctggaacgtcatagatgttcggccctattcgtctaaattctcgtaagaatatatcaggatctgggggtccttgagttagctttataatgatgccgtggttggagagcgtaccatgaggagcgaagtccatttttgttggtctgacgcttgcttttcttaagaacattgctgggtgaggtctttgcttttatatgcttaaatggtacttgccctattcacatgctggagctgttcgtcatcctagaacggcctagacgatctgttacattacaaaaaagttttagaagttccactgagccgatgcatttggcttgcgatggaaaagattgagcttgctcaaagctaaaaagcccgtgctaaaacacgaggccactattctcggacggataccccactgatcgcctaccggcaccgatcttgccaaaatagattccctccaatctgagagtatcaattggaatgtcactttttaatggtttgatccttacctagtgtttatcaagctatgtcgaaggatcaataatctacagagtggttttaacgaagtcccacattgcgaacaccagcaataaagccatgggtttccattgcccttcggtccactcaaactcgaagaacaagcatccaattcaaagatctcggtctttgcctaatgtttattaagaatctggaagaagtgaccgcatttgaataaaggatgagccagaccactacagttttgtacgctatctgcttcatgtgcatagtggatgtcattttcacactgattgggctttatttgcacagaccctttcatatacattcaggaccctttgtcaaattaaaccaaccctgcaagcctcagacggcccactgtatattgttccgattcggtcatcctagcgctctttgccgaaaaatttcttaaaactttccgggtccaaatcgccgttgaacagggtactgtttttcttcacagacccaccactgatcatgtggagctgagttccagcgggatgcttgcctctggcgtcgccgttgaatacacgtgaactttcgtctatttccatcccaaaaaagccatgcgcggagtgtcttgaagaagcacctatggggtaggtgggataatattaggtttttgatcaagtgagggcagcaaggagtgggacaaaatcgcaataccttgtcgactgctttcctcctcgcctcgaggaacgagacctggggaatggttctataaccaaagccaagtggttagctagaagatgacctcttaagggtttcttgatcacaactcaccttatcttgcaaagagagggccatatcctccgtatggtgctgaaaagtgacgggagggccacctcgagagtgttcttctttattgtttttatccatatcaagcaacgagaagtgaacggccgaagataaaggagactgagaaaagaatttcaagtggaataattgtagagtggacgatatcatatttatatcctagggtcctcgctaggagatcaatcacaccactctcaagatgaatgagactgaaaggactggccatttttgcagcaagtcatgaaaaaatcaagcccagccactcttaaaatgggcgtaatcacagccagatttttgtttttaggcgatctaggttcctctttctcgtaaataaaccttgccttcgacaaatacaacgtcaggaagctcaatagtttcacaatctgttttgtcgttgggtttcatggagatggctcggggtcggtttgctggcaattgaatgtgagaacgccatatagaaaagctcacacttcgctggaaaactcacaaagtggagtgcgtgtccatgctgttctctctgtttgatttgaaatgcatactggtagaggcattgtggcgttatatgaaaatttggtgttttgaagctcatataccgctggttcggttcccgtatacgggctggaagaattggggacagtttgatccaggcgttctccactttgctctcgttctgatctccagagggatagtatccagttcggaagaagaggccggagcgacccagaagaaagacagtgcatgaggccagttggtcatccagcttagagtagtgtagagtaatatgtggtaaaaatatcaatagagatggaaggcttcaagtctagcaggttaagaaggtgcctatttctactatccaaggtggccatcaactgcgcctggtcattaccaaagatctagccatggtgagtacccgcccctctctctggtgacgatggtatgctcacatcagaagcccgccccgattcctgcccaaatactctatgggccggcaaaaattgctttggaggcaatgctcttcttgagaattgcatctccatcgctcttggaatggaggccctcggaaaacctcagccaagatgctgaaatgctgctagatgcctgcaagactctgagaagcaggggatcccaggaaccctatctcgaaaatgacttacacctccacgtgggaaatatattaccccgatctcagttatggtgctgttctaatgctagcgctgatgacttggcattttgatgcttcatcttctgaagcatcgcagggcttgattgatttcttgagttggccttacgacagtgaagtgaagggaatacttcaggatcgatatcgaagcataatgtgcggaatggactcctcaaacttcgactttttgcttgtccggaactgagccctatctagtgatctgtgcaactggtaaacatggaatgtattatatctgctttgctcagcagtaaccgagctttctgaaacggttacaaatatcttcgagacgttccttgtaccagtcctttaaaacgttgtggatctcaaatccgagaaccttcccaagtttgcacctttttgcatattcctgcaggtatttggaatgaaggtgctggtaacaaagagctttctttgagtcgagatcttccactggttgttgcaaaataatcggatcatcgccgctcagaggaacgaactttgtaatcccatattttcctaagacccgtgaaataccaacctcaagcaccgcaagatccactaggaatgcttcatgctgatcgccaagctcttgaagagcaatggcatcaaaaaccacatcatcgagaccccttcttttgatgtcctccataagtgtgagtccattgggatgaaaccaaattcgtacggtcttgtttggttagagcctgtgttaatgtggaaaaagggtgacttacatgtaaacgaatcggtactgagtttttggcagaaagactagagtctttcgtagattcatgcatgttacttcgattgggatctgggcctccaaataaaagcgtttcgcgcgagttgcccggggaaaagtaaaaggaggatatgcagttcgaaaaaacacaacgaactctatgtaggctcaagcagaccatggtcttgcagtcgtgaaatcctggtcaatgattcggataaacctgagaaacagtagtttatatcatgatgatccagcagacttgtcatttctttggcatatgccactgattacaggtctaggatagtgaaagttagtttcaaccaaatttcaaattaatgagaaacagccttctaaaaatttgagcgatgcccgagatattgtgcgaaataattagtgggctctctttgatccattcttttgggcggtctcgaaagtccgaaggcactagtatcatactccgtccacgtattttaagtccatttttcgcttctctgacgttgctaatgcgcatatgagctcatgcggtgggcatatactgcgccgcaattgattacgcgtgacaggggtataggttcccaacccatacccctatcgcgcccaatcattcttattagtagattttatattgactctccttccccactatctcctcagaggactgaatcatctattctacatcgtactatcatctttgaatggcttcgtttatccataagatagaatccagcaatactatccactacgtcaccagtttagagaggcacatttatcacctccaggggatactgagagaatagacgccttacatcccacagcatatcctcgtgcaatctcaaattccactcgaaaccacaccatcccatcttctccagcctcccagctcccaaaccctttcagtgacccagcgtaaaagggtttcgctatcaggttcatctcgatcggaagatacatagataaagccattagaaagtttcatcaacaagattccttacgcagaaaagtagtctagagccgtatcttcctctttccctcaaatttccgttttagatttattattccaaagcgaaggttacctacaagacagtgatcccccaacatcagctatcccttctcggcattcagacatcatccaaactcttagggcttttgcttcgctcacacaaaaatgcgccaacaatgcgaagtagacgagattaatatcatcctaccagaatttcttattaagtgcgctttaccatattacgtattatctcagtatagatccaagttcggtgaacaagataataagatatatttcaaaaggcagagccaaccatcttcaggaacttcggcatagtgcagcttagggggtcgaggcaattaaccgccttcaaactaagagcggttaggatatcagaagtagtgatatattattttactatcaggcttctttaccaattaagttcatacggaactaacaaatgaatatagttaccccgacctttacttcattaaggtactaggcgaaagcaaccaaatcgatacccatatttaccacccatctgaaagaagaccaatataagaaaagcccagagagtctgcactcaaaccatctctctattccatacatcatcaaatacatatttagcaaaagtgtccagtacatctacaaaccgtttcgcttatcgctttttacttacaattagcctagattctccgacatatataatattctacactacaattttaatattgctctagaatcgtttgcaaaatagtacctagatccatttagttcagatgccatagataaactagaaagacaaaggctcttctttcccatacatcagttttccctagacaggcaagctaactttagggttaaatcccaaactaaaagggactcgcagcccacaagagacttattacacaaagcgcggaaaagacatcgcgttggcagcgggaccaattcaaacctagacggcccatctctcaatccaattctgtcggccaatgtacaactacagacaacctctaaggaagatcccaatcgttccaattcaaatatatcgggtaagccttccgggcaataagatccatcaacatgatactgactcccacagaccaggagagagcttccctgagcaggaatccaagccctaagggtttcccacatcaagtaacatatgaccatcgacttcggcttattagtccagatccgcactatacagtccacaggcgtcagacagcatattcgctcccccaaattcaccaagatgactcacataggtcctcaacaatgataaatgatcactacagaccaggaggtcaagtagacattatcagacaaacaatatctcctgctatcctcccattagaaccatcaccaagctttacagaccatcaatctcccctacactttcgacaagctaccataggatctctcgaacaggatttacccacctccagtagaattcaagggtccacaatcagcgaaatgctcaatatctcgaatacagcagtctataataaagtgattcttccaccgataggaaggactggcgtggctaacagattacatggcaatttagcaacgagcgatagctctcaggagctacattctcaattcactccatcgaaccaaagtttcattagcagatatccgtcacagtattctacggctggccaaggcactcaatatacaggggtcggtaagccgcaagtcgttaacacatcactctactctcataatatattatcttcattgctatttaaggaacaagaaggcccacatatcgataccgagccccagagagttaacacatcccttcagtcgcattacatactacatgatcttctagaccagtttgaacaatcacaataacagcctaattccgacataacctaccaaacgcaattcactgtctagcaacaacaaatggagagaatcagtatatacaagattcgatcacgcagtcataccaagtgatatagactttccaacacttccctaatcgaatcgccgcattcactccctagccatagttatcatatattcattttttctttattacactagaaacataaatacagtccataggcaggtatatgacatcttcgttacatacacgggttattaatcccagtggtagagggcgtccttatccgactcacagagtccccgaaataacaataagatcgccagagcctgctttactcttaaattaagatgatacctcggttctccatacagaatattcaaatccctatagctctagtggtcagcctactacataacgtactatttattacagaagatacctcttcgtaaaccccactatcaactaaaagagtccaaacccaccgtcccaactcacagtcgttacataaggatacacctttcgcaaacacttcaaaagatacagtactaaaccattgtaagaatgcttttcgtcgaccttcatcgatagaagagcatgtcgtttcgtcaggcggcatcgcttatccaaggataaaggtaaatacatctcaaaggggcaagttcagctgatcggaccctatagatacatagttactataatcagtttctcccttgatttatcgcatctttccacttactaaatatagtagaaccatcgcggggaatattttatattatcgtttcctagtcagcgcccaacacataacccctcatcacgtgccattttgtattatcatatgattaatagcgccattatttaaaagctccgtataatctcacctctactaaagtaagaagaatccaaactcctattcctctagccttcacagtgattatagctggtttccacttcactaaacaaaagttaggcaatgatcttatctcatctatttctagtcttctcaactcaataaatatcccaaaccttctctggggcaactatctactcactatttatagagttcccacgattatagatatcagtattatctcgattggccagagcatccactaatattctaacaggaagcagcttttattattccagatgatctcacccaggtcgcattatcttcacttatgagtactaggtttttaccctataaccaaagcttaggctgtccacactcagatactttacgagtcctaccggtattcaagcacctgcatattaataataagcttatggtctcgctttatcggaaatctgatatgctataggagtttgaagatctaaggtacttacctaagaaaaatccagatattataattacatcggacgatcgactcccgtcggcatctctaggtcatggccaaggacgcttctcgtcgcatccttataccgtgaaactcccttatactatgagatattgcgaggccctgattctattactttaccgtaactacaattcttcttacgagacttattagttagctattctaagctatatattagaatatatcgacggtacagacattttagataaaaacaagctacaagaaggttacagaaagttttaccataccctcaaacagggagatcctgagatatattcaatactagataagctccgactcagcttaattgaagagcgtcgcctcccaataataaatgattaacaagaccaggctaatacctcaatctccaatcaaaataaacataatttagccactcaaactctagatttcaaccgtcttctcacaatcaaatccttcagactaagtgaagtaataacctctttagtttaaggtcactgttttcccagttttcaagtcttagaagtcacaattgaaatacatgtggccaaaagcccaaagtttaacaaccccattttcccaacaaggctcacttaatagatcggtcataaaagctaaggagattttactgttcctatatctaggatcgacaaccatagcgtgggttgataggcagaaatgagtaaacacgacaaccttacgatcaggctccaagcgcgaaatatattcaatttcttagttcagccacactagatcggtatagtgcgcatcttgataggcttcgatagtccaatcatcaatataatagaagtcattcagaccgaaattaacgctttctttttatgcttgggccacccgcgagaacaaagtacatccgaggacagtgatcccaggtgaaatgtcgtagcgcatttgatcgagaataacaagtttaccaagcgtctcgctagatcctcgagtgccatcaattctcgttttaaacttattaacagcggattttgtctcagaccagctgctataatacgctttgtgattacctatcactaaaaaaacgatacagaacacttccagctgcctacgcaggaagtagaacaagccttcatctttgacatagccaatatcgccgagtagggctaaatatagtgccttagggttaacttcgaagacgtcatatacaacaggagattccaggtacaggtcagaaataatctagaacatcatatcgtcctttggcgttctatttgtagcaaaatttgtttcatactagaaagtggttatcagggttagggagtggtcggcgctaaatatcgctattagtggtaccgtaggtcacatgactgtttataaccaagaaccgatatacagctggtcgccctataagcgtatatataaactaagtcttaggaaccaaagctagctcgtcaggatcctctagataacttctaaatatttaagtctccatctagttgcttataaagcattcgttcgtctctaccatatctacaccgtcctttactaaactggaggtcgctgctagagcagtaattaatatcctcaaaaccatgcctgaattctcgaactccagaatagctgtcatcgggggattgggtctttggaattatctccgacgttatcgcactactgaggttcgatttcatgattttatctgcttgaatattctctaaataatatttgaaataggatgtcgatttcctcatcactgttcaaggagcgcccaaagcagtcaaggacaggctgcttactataccatcgagtcagttccagcaacaggctcaactctttttttacaaaggagtgggcggcaagtcgattcaaattgacatcactcctgattggcaggtaagctcagtgaccggttttcattgcaaaacatatacttatggtttacagtctccctacgttccatccgccgcggtgccaatatcggcagctcgatcaaacgccttgccttatatttccaagcttgatcttctcgtcttcaagatcaattgttgcggtttacgacccacgccggccaagaagctacgtgatgcaaccgatgcaaggacattggcagaagatctgtgttccagaggatctattaatctcacgtctgctcaaaagattgctgttctccagggcttagatgatgtagcccagctctccagaagagataagtcgtggtgggtggcaaagttggcactgtaatagtggttgtctgagtatggctcgacgatgggtctgaatggaacaaagatcagcagcaatgatatgtaacggttgtaacctgcgaacggagtcttgctagcccaataaagagccgatatgctatggtaacgacaaagtggtccaatcagctggctgcatatttctgaaagcccgttggggatacgcacggacctaggacctaagtggagaaggatatacgtaaatattaaaaccacctgaattttccgcgctggctacacttccccctctcatttcctctccctgactttcgaacttggctaatattcctctcctcctgttaggccagcgggctatgtaggagcggccatatagatggatggactacgtaggtatggccatgcttttctagatcgaagccttcgtgggtcgtgggcgagtgccaggtgggcccatggagcaacgccaagaggtaagcacgcgccctatagggacagccatggaggaaatccttgaggatctgcaaggctagaagcaatgcgcaaaggcgcaaatcttcttcacagtttgagcaaaagcgcatgttaacgtttatgtctttgcggcgcatgtaagagattacttataaaataaaaagccacaggtgcaaatctaatttgggtctttcttgacgaaaatgattgggagttccgaaacattctggggagcagaaaagggggttcttgcttggcggaaggtgctcaccgggtgataattcggccggtccgaaactgagcaattgtactccatacttgtaggagttgcgcctacagacttgcaaacttagtgcagcttcgcttcaacaccacaccccaattgtttgtgagtgccgaggtagttgagggactgctgtcacggcctaccgttgattctcaattaattgatgacagtctcttgatcagatcaaatgaactagtctaggagacataaaggcctacctaattctaagttcaacaaaggttagtggagaaacggaggtggtgatactgtagcaattaaaattcaagtatttaaatgttttaatatgaggccgttggaagtggtgagaaggtcgtttagacgttgtcctctctatagaaaagtcgagttgattgaatgattggttaaatgtggtcaacgtgaggttaaatgtggtcaacgtgaggaaaagcaatggcgggcggtgaaattgtgaccgaactacccgcccaagattggtcaggtattatagcataatcggcttaggaagcctacaacttgcaaattgagagaagttcaactcgcaaggtatattgcataatctgataaatttcataccagaaattgcttccctcctgttttcctaaatccccaagggtgcctgggcattaaacgctgcacgtgatgaatcaattattgctatttcagatagaccgcatgatggcaaacctaatcaagcctagcggcactctgaacgacattgagagagacactaacatcgtggtatcacttatctccatcgcaaaccctcgcgacaacaatagcattgtgggtggtttcctccaaaaatatatacggaggaaacaaatagagccaaaacacagttgtcgttccccgaacgacacagtctgcttattggtgctcctagggtattacctatcattccccggagctatacagtccactcccgcgagctggagatcccctgggaactatgacttgactcctagaaacgattaagagagtgcctaggagtcatgttatggattctgggattgcattcgatcccagaaaagtgagggtcccactcgcgagataaaaagtgggctctggtatgggtaattaataattagaatgtaaattaaaacgcgggctaagtgtaaagataccggttgaagagacattgtgttgatgaacaataaataacatgcaaccaacaattgtttgggagtcgaccggaagtacaatcaatattaatgacgccttccactataatcagtacagtagaataaacgagaataaacacatagtttgtaagacatcgacgagtagtacaaggcccatcgtggtgagaaacgaaggccaacgtttgcagctgttgattaaacgatcggttgttagaaatgtgagggttgaaacgaaattaaataattcattttctttttgagtaactgaaagaagtagggtgtttattaaatatcattggctagacaactgtctccactccaaatcagcgcattttcctaatacctaggcatcccccaagtctacagcaaagaaatcatttcacccaggttagagatgtcctgggcaagcccggtgccaagcctatttctgccatattttccaggcggcatataatagtttttcaaccttcacgagagcttctcattaattcgtgtactgacttttccatacctctagaagccactttgtctccaccacggttgaattacgtacccgataagctgactacacaggctatctactttcccctatcctcaggcctactaggagtcgtgaatgtcttcggaatttacagcgaactcttgagtaccctttggaaccacaaatcatcgtgctttaccctcaggacctcagtgacttcgaatccattgagataatgactgtttcaagtcatggaccgaggatatggcaaaaaataattgtttgcatagttctggtctggtggaagtttcgcttggtcgtacaacttcatgtatgttgttcaggttcaggtgtatctttatcaacctgctccagatcctgatctgttactagctttggggctggatagtagaggttggctttcccaaaaaatgggtcgaggagccggtcaataatattatactaacgcatcaagctgaggcctagttatgctagaattttcatttgtgacagctaaccgatgtgtaaacattgggtgtctccgacgagaaacggtcaactgcactgtggggttaaagcaacggatttttttattttttatttttttattttgtatttattgatttcacaattggcatccctcaaattcagtgggtaaagatctgattactcttctggactcggatttctgagccagctaattgtttaatcaccaactgcaagtctactcttagcctttgaccctcatgttctcaccactcatcggctaatcaatgacgtttcgtatattctactaatatcatggaaaacatcgttgaaagtacaaatttggccaactttctttctgttgcctagtattctatagccatcctgtgttcctaaatctgttgctctttccatctgaatctagaatatcggacatgggagtctgtattaccgaatttgggttagcgtcactctgaaccacaggaatagagacgctaagagaattaagcattagtgagtggtagccaacgatggctcagggaaattttgaggcatatgatgagaagttctttggctcaactttttgaggtcgatggatcttagggaagatgagtagatggttgatctaccatataagacatgtctccgttcagaagattatgcatacgtgctgatattccctcaattctaaaaaaaagtacggtctagagagtgggtacataaggataaggtattccattacatttagctcgcgtcccacttgatacggaataaaggatatttttcgcgggaatcagcaatgaagaatgagggcatgaatattgaagcttgtgtaaataccccaggggttatatccgccgcttcagatgcctcatgtttcaagtgatgataatgaaggtctttttttgatgtgagtggttatctcttcggcatttttgatagatttatgcgggctccttggttctatggtacaacgaagaataagggcgtatatattgaaatataaggcatctaatgcagtgtatctacacaagcttcaagtgatggtaatgaagctcctttttttggatgtgagtggttatctcttcggcatttttgatatatttctgcgggctccctgattctactagtacactttgccatcaacctgctcaaaactgctgatactgtcagagaccaccaggaccaagcaaggcttgtccctataaatacctcgtagacgtcggccctccaagtatttttttatctaatgatcattgcagattgtgtcaacgaacaaagttcagcgactcgtgcagagatcctattccttacaaggccttaactgcccagatgagtcaggtacgtctttttactttcccatgaagtcccctggaatgattgtatgatgtctaaccgcatagcctagagcataccgaagcgtgttttgtcaaacagacggacagcgagaggtaagcttattctctctattttgaaagaatttcgctgactactagctttattgtgcaccttcctcacagcgaaatgacgtaacatagttgtcgttcgaagtaaacggctgccataggagggcagaatgagggcctcgcgaatgatgcaattgagattgtgatctcgctgtggtgactgtgcttgaagaggattttgcaggcgggccgaatttatatatgcactgacgaggcaaatctaggtgccatcgaaacagcgtatatttggaaacggaggctctgaatcaacggccaaagtgtctttatatgcctgaggcaccaatcgactctgcagtcaagggtgagtaagctggatccctccgtgacagtccgttcctctcgccaaacagcgggcggcctactctgttaacttcattcgattatctgctgaatacttctttcaacaaaggaccgaggaaacaatcgctgaattacgatgtcagcttgaagaataacaaaggctccgagaagcagcagagcacagccagggggaggaagaacggtgactccaacccacaccgtattggcattctcggtcgccgtcacatctctgtctagagcgagccgagttgagtcggatggaccctcacgactcagggcgaggcggccgacccagtgaaccgaactttgcccccagtgcatagtccctttgaaaccagagaaaatacaaattttggtgagtgctgcggcctcccttttgttcaggaagggatattatgtcatactttgagatgctaaaattaactagttagctaaccaatagaaacattgtgtcattttccgggaaatacttctaccggaaaccgtgatcggctgacgtcagcctcctggatcaagcatccaccagtcgagacctgtcgcgatcttctcaagctattttcccctccgacagatcgatggccgacaacaactccccagattacaaggctctctttctgcaggcggaaaagagacgcaaagaggccgaagagcgacagaagcaggccgaagatgaaggaagacgagagaaaaggaggcgggagcaagctgaagagcgcacccgaccgaccactttcgtggaattcttgcgccattcctacaacctgctctcccggccgttgagagttgagacaccatctcgctcgactaccgggaaaataccccttccgaccgggaaatattgcccaacacaattggaacactggaccgactgctcagcacagcagttagagctctacaagtccgtctacagctacattcagctgacaccagggggtgcgccacatttgttctcatctttgcatgaggtagaaggattaggccgacgactttgtcgtaagcctataagcagcgagcaagaactcgaggcctatgagcgatttaccgtggaagaacatgtccacaatataattaccgagttgtgcaaactacccgctgctcgcgacgagttcggtctcggcgatggaatccagttcagcaatcatatgaattccttaaacgagaacgaagctattgaagcggatatgagccaaccgtcaaatatacaccacccaagacctgatcagttctgcatccatcgtatcgacgacaactctaccactctcctcacatctatcgagtataagccgcctcacaagctctctgtcactacccttcgtataggcctccgaccaatagacttatggaaggatatggtccgatcaaacaaaatcccgacagaccaggaagcgaagctaaggtacaatgcggagcgacttgtctgctccgctcttgtccaggagtatcatgtgatgatccaggaagggctcgagtactcctacgtgaccaacgggattgcccgggtcctccttcgtgttccacacgatgatcatagcacgctttattacttcttatgtgatcctaacagcgaagtgagtgcagaagttgaagatagtttccaacaaccgaagacttctgtggccaggacactatgtctatgtctaatagcattccgctcactcgcacgcggtcaggaatagagaaattctatacgaccagagattcctatttggaagaccagttttaatcacactcgctctcacattcctacagcggagcttcagcaaacccttctccactccaatagcactattctggagtatacaagtccagattccggttcggcttatgaaccgtcgtcatccccaccgaattctccacaatcagcagctcgtcgactgtccactaggtctccggccagctgtgcaccgtcgggtgtacagcatcggtctcagtcgccggactcatcgggctcagattcgaacaaagcaacaagccgcaaacggggcttcagccaagttgcatcatccccatctgtccaacgagcaggtcgtcaacggcacccagggcaagatcgcgatacgaaattctgcacccaacgctgtttactcagattacagtctgggggtattctagacaactgttgtccgaatgtggtgcgccatcgtcgaagcaaagacgttcttcatcatccaattacctcagaagatttggtgcgtttactaaaggcacaactggacgaaaacattgacagatacacaccccttggaggttgcggggcttacggtgcgccgttcaaacttacatgtatcgtatatggctacactgttatcggaaaaggaactacgtcggggctgtggaaagatatctctcgcgaagcgcaagtataccaaattttgcgcaaggcccaagggtctgctatgcctgtatttctagggacgatcgacctggcaaaaatttatttccttcatagggctggagagattcgtcatatgctcgtgataggctagggaggcgaaagtacaacgtcaatagaactcacgcctatccttctccaggagatatataagtcgaacagagagatcaaagctttagaaatcatccacgaagaccttcggcgtgataatattctatggaacgaagagcttaggcgggcgttaatcatcgactttcaccgctctacgttaaagagtcgaccgactttacagcaaccacgagccgtaaaacgacgactatgtcaaccagagataggagatccaaaacgtcttcgtgtgacgtgaggcagtttgcttatttattagattagagcaatacaaatatacatgataatgaagcataaagcatttccggcccgcatccgcataaatcagtcagaatttctatctattataattcttgatgcccacttctccaacgcacctacatggcctctgatgatatatgattctatatgcgttgacaatcacgaattaatcatccaatttctggctctagacttaacttttgtatgataccatgaatcacataaaaaccttaattcaactataaagcttcaggaccgatattatagactgtcgtgtactaaccgaaaatattacaataagcgcccaaccgctcgacaacctcgaggaacgagattatccacataactttcccaggtatgctattagacatacattccatcagcaggcctctctctgccaaactcctttaaaaatttcttatttgattcagcggctaacttcaagtattcgtagttcacctggttgacgtcagctttagcgagagcgtgtgcaattgctgcgacgtttttgatctggttcatgattggtcagcaagtgagatgttcagtgccactcggatacccacctctcgtccatttagagctaaagactccaatcgtcgaagttcgtgctcctcaacaatggcaggtccttgtatcgtacatgccttagacagaaaagttgaccagagatctctacaaaactctctcgttaaattttcatactcaatgatcaaatggatccggctaagaattgcgtcatcaaactagataccccgatttgaagtcaagaaaagaattccttgataatattccagctttcggaggaaaatggtcacaaggcgattgtaggtgtcatggtaagatgtacactgctccataaacgcgtctgcctcatccaagagaagcacggcattaaagtatttggcgatcttaaatactgtttcaagttgtatctcaagcgcattagaatccccgtggttaacaacaagttcgcctacagatatctagaaaaatcagtgactctccaaaatcagccgagctggttggttcatacagaatagagggggagcttgaaatactccgaggttaccttaaccgtgaaagtctttccgactcccggtaggccactagcacaagttaggttaggaagtcttaatcttatagacgctttgccgatatacttcagaagaatgttaaatccctggcccttcctatcaattacatcgtcgaacggtaccgccggtatcatccctaggcaggttttcgccaataacaagaggatggtcttaatctctgaagggatctttaggcagtcgaacaacttaggtgaccaaaccacgtccctaagagcactaactacacactccactggaatcacattagccggaaccaaaccattgtcagtcgtatcacatacagaacattttctccttaaaactgaaacagcaaactgttgggcaggcaaccagtaaatcggcctcgctcagcttctgtgcatccacaccgtctcctcgcattttctccttctctcgctcacagccctccataagcattgcaccaatatcaaggactgcaattctatccttatctttgaccctaatgtcgcggagtgtcggtcaggagtagtttagctgcattttatggaaaaatgcagtatccactgccactcgactgttaatattaactttaatagccttccccttattcataaagaatgcgctgcctttacagtgccgaatgtgtaagccggccaaatcccgaaacttttgacccctctcaatcaagactttccggacttaatcgtgatttagatagtggtagagagggaaggcctcaagagtctcgatcggctttaacccccgaaactttgcaacacacagaaagattccggcctcaccgaacttgactccgtcataatcaaggaatcggcactcgagattcaaccacatctcgtcattttgtgtcatctcttcgcccgtatcgaatacgacacatcggggctcttttgtgccaatgcatatggtataaacatggcaaccaggcttaaaaagcgcctaaagaaggtcatatataatataaccgtgctgtaacattgattcgagacgctgcgagatataagcatatacgtgcttgaggtggtcgataagcaggcggagctctgcctacgccgattcatagtccgaactattgtccatattctccacacatctgtcgagctctaggaggaaatggaaaaggacggtttacttaatctaaaccaacgtcagcgatgttcttaggcattatattctatctcaattaccgatggcttatcgtccatcaggctaacggccttgatatcgtgcagcatatctcgtaggatatcgcgtaagccttccgacttgatatctataaatggcactacctcctcggacgtccggtctgatcatactattagtaggttttcggtatggcatacaaaggtgtcacataccaacacgttcacagacaacgaatgcatacttggcgtagtcatccaggtcattcctagtctccgttggctcggcaatcttatatttacatgcttctttgtcccagctaaacccgtgtcagctatctgaaaaagtggaagggacggttggctggtagctcatacgtttccataactgttttgaattgggattttgatacccatttctcaaacgacttgaaatcatccggtatagtacagatcggactctcgagattaatctcgcctaccgcctgaacattctcttcctgttcgttgctggcagaagaagaccgagcgggcttagttgccaaggagagttcagctgacgtacattcatcgtcggtgagcttgaccatcaaccgcttcagtcgaactatatcgagacctagtggggattggtcctgggagacaggagtgtttggaggttcttggtcggcaagatcgagcagcgcgttctcaagaaacgcactaaagagatgcatcagatccttcaaggtggcaggaggcatagtcgacaccttcgttgggctatcgggtggcgtcaagccttggtggcaggaggaggaagtgttcagtgccatgttgtgcaatttgaacgactagaagtatcggtgcggtatggggagctggtatgaagtggcccaagagactaactgtaatgccaatgatgaagaaaggtcaacaagaacctgagaaattgctccttcttatatgttcgatactccggacttctgtgtgtttttcttgggatacagaatctctatacttgcagctcaaggattgcttcccctcacgtattcggcgtttagctgcatagggctgtgcttcatggtgcatagcatatgaagtaaataccattctcaattggataggttcggaaatcattcagttggtggcgtcgcttttactacttctgtcctggatagacaaaatcgtaccctcgttcttaggaactaatagttttagaaccccataaaagtgagagggatccaagttagtagtctaccacttgagagaaaacttatgtaatggcttgtaactcggtatatctgccacccgagttaatccgactgacgtgggtccttgaggatcctctaacttcacgtgcaaggacctcaaaccaacacctgctcccaacaccatcagaactgctattcctacgtttggactatcgccatcttaacttgggagtctctgggatactacaacaacaactattgacgcacaaatacgcgatgcgttgcgctggccaccgttgacttgctgcccaatctgggtgtcataccccgcttctcttcaaataacggtacgaaaagtcgcaccaggaaagaggacgtcgaaaaaaaaatcccgttccccaaattgaacaacggtgctcagtttgctcgatattcacatttgcactatggcagttaagctcaccatcaaatccttattctacgttcttgactgacacgctttctcagaagggtgacgaagccctcgctgggcgcgaggaacggaatattgctagccatcgatttcctccggacccagaaaatgacagaacaatcaaatttcaaggactatacatatcggtattcaacgaagacacgcaggatcgaaaaacactcgaggagaacgtcgccgagtacaaaggtttcgcggttccgaagggctacacaacgtatgtaaggggagttgaaattgtctgctgggtagtttaggaggaaagtgcatgcttcacgccatatatgtcattcagcctatacccatcattgtgaccaacccagatagtgaacgatacgtcctgtgtttcgtcctttgggaaaagtgtagccacacaagctattgtcccgtacccgtgagacctttcccacttccacaacgcactgttttggactgcagcccgaaatggttgcggtagttgcatcaccatcgtacttggggcatttatgaacatgtgcttcatcactgtagagaatcagaatatatccggccacacaggcgatatgccatacctcggttttcatcatcggggttccgaggcgcagtttgaactacctggacgggcatgtcgtgatcggtgaactcattctactgggacggattctctagatctagctgagtgttagttccggaaatgctcctcgaagggtcgtcttaccatgcacaagctgctcaagaccgtagcacccctgaagttccccatctttcagtctagacagtgtttgacatactgcgtcaggccaattcttcctgtctcttagctcaatatcctctaccaggcagtcaaagatctcatttggcataaagcatggtccccatgtagttggaggataagcaatagcccaagagacaattccatccgggctaagttgttgaatcctagaacatcttttttggaccacacttctcctccattttgtatccttggaatcgaactcagattgcggcgacccgcggtagattaacttcatgttcctgcggaataccgctggattgcgcaaccgtcctccgctgagcactgtggcaattatagattgtgctttgagtctgtgaggctcactgtccttccatgcctgctccatccatgggcgcttccgtaatcctgtttttgattcgataaccacaatgatgtctttgaggtttgcagcgatctcttccaacgtttgcaggtcggtccctgacaaagaaatgtcacgcatcgctaagttcaaggcacccagatctctagcgatggagcttaattgattgatgatggcggccatggctaattttggatacggatgccgaggtttagtagtttgaatggtgaaagttggaagagtcaaagtattatgggccacagttttagagggtgtctaagtttatggctgtctaagtttgatgacgtgtaccgtagttgctggagccaatggagtgagtggtggcatagaggtagggttgtttgtgtagggtgacattttgggacttcagcagcggatcattatccctcaccaagaatatcgcccccaacctattatttcacgtgcccacatcacaatatcgcagcctggaatgataatgaggaagcctcacttaagaacgagctgcagatgcacgcacccttgtcgggcactagcctcttatgtttcctccggcgtgcgcccgagcgcatgccggaatctcaggctgcaaagccacgtcagcagaccaagcagccaaattgacttcgtccgtgtctttcagagtggctgcgcatggtgcaccaggatcatacttgcaggggtgctcctgagggtcctatcttcagcaactgaaatattagattagtgaccgtcattaccataactccgctgaatgccatacagcattttgctccattttaccccaaggtgtcgacaaatagtttctacatagcagagcagtttatgtagatactgttgaggttctaggagcaaacctctccactcctgagacttccaggtcctcgatccttgcgtaggaaaatgtgttttgctgaagttattaatatatgagcccttgccacggtatcggggatgctattccagtgcaccgaaggttagtacaactacagcagcccaatgattgagtcggttatgcctgaagctaccgtggagggtctgaagcatctctccattgtgcttgaaaaggctttgctttgcctgacctcaccaaccatgaacttctctggctaattatcagtcggtaaattccaagagtgtcataggcataagatctaaagagatctaaagctttaccgcttaaaccacggaaatcggggttatattcttatcgtggaagaatgtctggttctggtcctactcaccacctggaaaggcatgatcgtcggggattgcgggatcgattttttcattgtatagaagctctccagtctgggtagggtgtccagaattgacagattgagggtggtgctaaccagcaataacggcggggtccaagtcgcacgatccaaaaccgggggatcgatactcagcactcagacaaacattatcgggtattgtagcagaatcgatatcttcgatgctccgtagaccttccaactgcaaaaggtctttagagtcgaaagtctcgacgtgaggttggtaaaggtggtaaggctcaaatcctccggctcgtgtcgagtgggttgtgcgtcagaatgctggccaccatccaagcaaacctccaacggcgggcgggcaggaaggggatgccggccaggtttgtgggcatgacttttttgactcttggagacggggtcaataggattagagggaggcggggtgggagtcatcgagacaagacttgggtagcggcaaatatcaagagaatctctcagaggctgggctttgtcctgaaaaggattccatggccggaaggattccaggcgaaaactagcgtttgacatactgtgtggaagagatggctgagaaagtcttcaagatgtggtggaagtgggtttgaattacagttttgtcatttgagtggaaccgtagtctctttatagacggtcgcccgtgaggcggaatccgccttctacctagcgcagaaatcccgaccagcccctgcaatccaagccactgcattcaagaggcgggacaacaccagtttcacaaccacgggatgtagttcaccggcaacaattcccgctaccctcgctgatgacatttgcgacgtatgcccacactagtcgtcagcccgttctccattcggtatgtgacggtacgatcgtggcatggttctcgcggttgcagtccagcattggccgcatgatgcagcatctaccgaggtcaggcgagtgtgcgatattttcgctattggctcgcatcaccgtagcatgctttcgaggttcaccgattgggtgcggagagaccggagaggccgacgatgacgacagatgggaggtcgaggcactcgcgaacaagcggccgagtgtaaatctgcgacgctaagggctatgcaatgtaacctcaggtgggggcctgagatggggcggatgaagcggagcatgcagcatcgagaagacttcgcaacaaggggggtcagcgaaataacagacactcaacaggaaggcctcaccagcagaaagcaagcgatctagatggaattagagacttctttggaaaatggagtattgacacacacagtcgtgcgatacgatgcggtgaatggctggatcacctcagtgtttctgctcctgagcgactggatagcactgcagcctacgctggtcagaacgaccagggagtcggatcgagcggcatctctggtaaaatgaaagggggcagtgcgtcgggctgaaagcaaatgtgtagtagtgggtgggggccagagtaaaagaaagggggaggcgatgagtgcaagatagagaggcagaaaaatggaaaagtgagagagagaggaaaagagcagcgatgacgggtctttttaagtcggagagcactgaggggaggttacgtgacggcgtattggggcgctaaacccaaaaaagcaaaactaaccggatgcagtaattcacaggtccctatattacatactcaatatctttgaaagacctatagctagcacagccatatcttggaataaatccatgtatagttcatttcttttcaaatctacggagacaagcgcaagaatgtatacaaccatgtacaaaacccccctccatagaaacaatggcttatctctatgtagctttacatcttgtatttcagagcttgtcatgtggtgaaacgctaaaagaaacccacagcataacctccccgtcggccgtttaagcataaagtttgaatgtcgagctatgcacgagcgaaaatctcggccggttttgaaattgacccctagtatcatagtatatgcaagtaaggcgttctagttggtaagattgagtgagattgatgacagattcagcacacttgtgtcaaatgaggtaaggtctacttcgtataaggctgaagtatagtctgacgccccaccaagtacctatacatacttgcttattctgtcagcttcacttcatttccatttccttgaggctcttctgtccgacaagtgctaatgaagcattcggttttccatggagggcatctgagagtctgatatgtggttgatatatctttccaagggttttcttactacatgtgttacaatatgcctaatgtgtaagaatatatttggtatctgtgagtacaaaaagctcaggattctattcccctttcttccctccacaattgatggtgaagtatcaatgtaaaaagtgcggagtaaattaactgatggaaaaatatattccgcagaattaccccggatattgatcctttgcggggttagacgaactactactagtagatcgtctactcagagatctatatattctactacctagaagaagcatgccatgatatcctacgcaattctaccttcctttatgctagacctaccaatccaattgagtagcaaaaaatgattatcctgacgatatgcgtcctagccatcgcctttggcactattttcgccagagcaagtcctctgtcaagacccgccaaactcaactggtcatcgactaaggctctgtgagtatatctagcctaaatcttgcaagcagcactgaccccagaccaaagaatcgcctttggtgactcctacacctatgtccagggaaccatcggacaccaaaatttcagtttcattggcgaccaattcaacctcgcatatgatgccgaagccctgctttccaacaagatagtccaaaatcaagtaagcttatatcttgacacgattgaatcaaacacagcaccactcggatattaacgtcccacgtctagaccgcaaccgcagaaggcggtccgaactgggtcgaatatctcacaaactgcggcatccaccaaggcctcacctctccacaagactgcaaaaagcaactctgggatttcgcctttgcaggcgccgatatatcaaccgagtagtaagtacaagcacaagtacaatcaacacacattttcgagcaaactcaactaaaaaccaagcacaccaccacaccacaacttcacagtctccctcctagaccagataaaccaattcaagcaatatggccacccagccctcctaaacagtctaccaagcttcacccaagacaaaaccctagtcgccatctggatcggcatcaacgacataaacgacagcgccaagtacgtcgtgaacttcccaaccttctacaaaagcctcatagacacactcttcacatcagtggaaatcctctataacctgggctacagaaactatctcttcatgaacctgccgccgctagaccgcacgccagggaaccaagcaacgaaggatccgagtccgaattcaggtcgggtggtataatgccgcgttggctgatcatgcggctggatttgcggcgaagcataaagaggcgcgggttatgatttttgatgcgcatgcgaggctggcggctatgcttgatgagccctacaagtatggcattgttaatacgacgggcttctgtgctgggtatgatcagccggatattgcggttgcatatgagaagtatgggtgtccgacatcgttagagcggtatttctggtttgattcgggccatatgactagccatgtccatgaggttttggctggggaggtggaaagatggttgcaaggataatgaatggagataggcaatagctacatgcaagcacgttctcaggctgtctaccaataactttgacaagatcgagaaatacttggtggaatgtttgaagaataataataatcattattgcagattgaagtcagagacttcagcaaacgctgtcatgaaactttttaactaatcgacatgtatggactcatcgagagaactgatgaatcaagatccgagactgtgaaaaccccggaggatagagacggaacaaaaactaagtaaaacttatctatgacatcgaaaataacgccgtcctgcccgagttacgcatgaagtcaaaggaatgggaaagagtctaccgggatcgcacaatacaaggcaaagtggctgactgcacggggagcagcagcgaagcatctaccaacgacggttgccgccgacgggagcagagttggaggcagtgaaaccaccaccaccaccaccgccgccgcgaccaccaccccagccaccacggccaccaccacgtccacggccaccccagcgaccaccaccgccgccgccgccgaagcgaaccatctcggcaagacgggggtcaacctgctgcttagcttcagtgaggatagtgatcaagtcacgagcctgcttagagtctagagaaggggatgtcagtacaacttgcgaatgtccaaaacacggacgaaaacttactgtcagtggtgaagaaggtaatggcggtacccttggcaccggcacgagcagtacgaccaatacggtggacatagtcctccgagttgttggggtaatcatagttgagcacatgagtgatgtcgcgcacgtcttttcagaggaaattcgttagcaaatagaacattagtggaaatatgaggagtacggccatgaaggaccctttctccgtcgtgcaggacttgatgcatcactgctctcttgatgggtttctttgaagaaaatcccaagggaagcgaatccatgggatggcggtgttatcatatcctagagaaaccttggaaatgcagccttcaacagttcaacagttcaagaacaacgctgtgtgagagaaacttcgactcttctacgagcctgtcacacaagagatggagaatagagaatcaaagccaagctagaatgcttgctgctgtgctgcactgtgagtccaaggtactcttggcatgagaaccatttaggagaaccatttaggatgaccaaatacgcctggacgcggcgtatagacgccgacgtgcttcgagagagttgagcaccgtgccattgtattacacaacgtcaacacgggtgagtgttttcaagggccccttaaggggggacaagaaggggggaggggaagaggggggaggggtgtagtttgttcataccaataccacgcgaggccacgtcggtggccaccatgatggggcttttgccttgcttgaactcgttcaagacccagtcacgctcgttctgctgcttgtcaccgtggatggctggaatgtacgttagcaccgtacacatgtgtcaattgggaacccaaagaaaacttacaaagcgcgggccagccgtcctgacggaggaatcgggtaatctcatctgcgacacgcttggtacctgtgaaaatgatgcacttattggagcggtcctccataatcttctcaagatgcttgatcatcttgtcacgcttctcaaagtccgagacgacctcgacaatctgggtgatgcggtggttggcggagagatctgtggagccgacgttgacttgaatgtagtcgttgaggaaatcagaagcgagctgacggacatccttgggccaggtagcggaccacatgcaagtctgacgatcagggcgaatttggccgatgatcttgcgaatctggggttcgaaacccatatcaagcatacgatcagcctcgtcaagaacgaggtaagtgacgcgacgaaggttggtacggccagcctcgagcatatcaatcaggcgaccgggggtggcaatgcaaacctcaacaccgcgggagaggtcacgaatctgaggacccttggggacaccaccgtagacacaggtgttgcgaatacgggaggactttccgaacttggtaatctcagcctgaatctggacagccaactcacgagtaggagccaagaccaaaacaatgggtccatcgccgggggcgaggagaggctgagcgttgatgtgaacaatagcggggagacagtaactcagagtcttgccggaaccagtctcggcaataccgacgacatcgcgtccggacagagccatgggccagccctgggactggatagcagtaggagcgtcaaagccctgagccttgacctcagacaaaacgtacgcggggaaaccagcctcgtcgaaggtttcaacgggacggggcacattggtaccctgaatagccatctccttctccttgcggaaggcgataatgtcttcctccgagcgcgcagtgacatcggggtgctccttgtagaatgacttctcaaacttgggcatggtgttgggatctaagtggaaccaaagttagtattgcgtcaacaaacacgcctgtcattggaatcaacttaccccagtcctgagtcttcaggccggcgccgaggttgttcatgcggtcaccaccggcagcaccgccgccgtaaccaccaccaccaccaccaccgtagccgccgccaccgctgtaaccacctccacggccaccgccgtaaccaccaccgccgccgctgtaaccaccaccaccggagccaccgttagagtagccgctgtcacctccgcgagagctagaatagcaaagttaggacgaattcttctgcgatatgcgaggtctctttggtattggttgggagaccacgataggaatcccagtgcccaacgtcataacaaacaactgcaggatcaaggcctttgccagaaaaccgtgcagttgatgagatagacaaagaagacaaagaaaagtctcgatgagaatgaacttaccggtaggagtcaccgccgccgccgccaccgcgagagtagccacctccgtacgacatgattaagtctgcgaagggttgattttagggagagagagtgattagaatccgaggggaagtatgaagtaggaagagaagagaaagagagacgagttcacaagaaaaggtaggaaaaggttgggaacttgaatgaaaaggaaggagaaaaaataaaaaaaaaactgccagggaggaaggcgcgaggaaaaattagattaggcttagcgccctttgtgttttccttggtatcatcacatgaccaggtctggagcaggtgcctcccagaccgcctgcctaaaaagggcttagtcatgactcgccgctttcgtcgcgtctgtctatcttgcttcttattggttgttgttatcgacttcaggcagaaaatttagaaattataagattcaccatggataccaagggggcaaataagtcttgagtggcgataatgtttgacggcaaagtgaggattttcgaaaacaaatagactgagagtctatagataactatttgataatgcatagcagcatgaaatatcactagagaaaacatatcatatgagcgaaaaaaagaactatgggtaaccgaagtgagacgaatagcgtcttgccctatcgtcttgaatcggagcgcgattatcttgcctgggaatagaagtccgcacgtcagtcacctccggattctgaccttcgagcccttgcaatctacttcaaacagttcatagcctgaaaatgctctcagctgaatctagctggacgcccaatttttatttccatagttccaaggtttcactaatatctccatcaatggcaagaaacgtgagaatgtattgtttatgacagatgaaatggaatagacaatggaatatccggacttagatggagtgatcgcagcaactcgtaaattgaacgaggtgtagatagcagcctgagatcttaaatcctattgctcctcacctccgaggcccatatcccagaaacgaatctccaattccgtagctcgaacaaagatcttaatcaattcttccatgcgactgggtgacacacgctgcatgtgatcctctagcaatgctatgacatgaaatgagtcagtgagatgttccactcgttcttcacgatctgacttacctgaacctagtcgcacagcctccgtatagtcgtcggcaacataattctcgatccatttccagtacgtgttccccactcgaagagttttctccgccgtatgcaatcgtcttgcaatggcgccgtatccgatcaagcatggtgcgagagccatttggagagccagccagtcctccgactggcctacatccaaaatgtatcggctgtatgcggtgcaagctatacatatcgagattagtacatctgtcgagtttgtaaaaaggcacgatcggcctaccgatagtttcgggtgtatcttccatctcctgcttggaaagaccaaatgaggcacagtagtcgatgtgcaatgccatttcccgctggatgtggaggacaatttgggccgactggagggattgtatcagattgtccttgaaagcaagtatggtgagcacttaccgctgctattgaatctatgctcttggccttgtatgatgcaagtgcattgcttcgggcaaattgtacctacaggttgaatcatgataagttgaatgccttcttccaaccggattgaagatggctgtctcaccaggtagagataatcttgcacaagatacgccttgaagcgtgcaattggcagtgtgccctggcccatgccctcgacaaactcatggtgggtgaattgccgccatacttgctgcacatcttgacgatccaagatgtattcaataaatcggccgctgaatatcatatcgttaggacttagagaatcaaaagatctagggaatgggtcacatacggcgcaaagggcatagtgtatgtggagtggaaatgattgatcggcccgctcccttgacctaggtcaatgctcgtcttgatccctatctcaacgaatcgcacggcgcttcggaccgctctgatcatgtctttaccggaagccaggtttgcagcaattgccgacgcaagtgagcagcccgtaccgtgggtatttttggatgctaagaactcagtctcaaataaggtggttgtcgtcccatcaaagaggatatccacgactaaagttacttctttcgggtcttgagatgtcttgagatatttcgtcaaaggaaggtgacctcccttgaggaggaccgccttggggcccaatgagcaaaccttcttagcaagatcaaccattccctctaggtcctttggttcggaggtctctgctccggcatctttcaacaagagaagagcctccgggatatttggtgtcagaattgtggtcaaaggaagcaactttgtccgtaattccttgactgccttttcaggtagcaactgagagccactagtggaaaccatgacctgttgatgcctgttagagtgacaatttgagaacaggacattgagcataccggatctagaacaactacaggaactttgtgagcttgtagtgtttctgcgatgacatcaatggtctcagcagaggagagcatgcctagggggtcataggtcatcagtggcagttctagatggaaaaccacgaatcatgaaacgcaaatgacttacccagtttcactacatcggcaccaacatcttctagtccagcattgatttgctttctcacaaattccgaggggacgacaaagatgtcttgcacacctagtgtgttctgtgccgtcaacccagtggtggcagtgagagcatagcatccatgggccgcaaggaccctttgatcagcttcgagaccactggaacttgttagagctttgttctaaatcatgatatagcgtaaatgatagggatacaaggtcaagtatcgctttggagataagttgatggggtacctcatttttttttttctaaccggtttttgcgagaggatatttagacttacgctccgcctgaactgtccgatcctgcaatgaccaaaacccttttgacagacatgattgaaagagccggccagaaattgagaaggatatctatctgctctgcaatggatcaagctgaagtgaagaatgacggagtggggtgggcatccatcatgagaattgggggtggggtgcttaagtaacgataagacagatagatcttgatatggatgaaatattaaacgtccactcgagacatttgtagaccctaaaatatgcaattcgatttaatcatgactatgctaaacttccagaccccaatatccttagatatttacaaacacccaaaatcatacgccgtcggggcatctattgtaacatgaagcggaagagaccatccatctcaacccattgacgaccacacttcttcaggtagctatctaccacccccttgatcgtaccgaatcttgtgcgattgaactctgcaagggcggcaacactgtccttcttttctcctgtctctttctcggcagcgaccttagctttttcgacatcccagagaccggcaaagtagagaagctggttgtatacctctttctccgagtactcgtacgacatgcgacctagacagccttctgcacgacctcggggacccaagcagcggtgtccataaacgctgatttgccgtgtgcgattgccacatgacgaatcgtcacagaccaaccagccttcatagtatcgcgaagtctgttggcggatttggttctccacttgggcgacaattgtcataaccgagaagggtttctggcagctctggttcggacaaacgattccgtgcgcagtgcacatgtgcgatgaggtcaccagaccctcatacacagattgttctttgcagtatcggcatattagggacagtcgcgtagaattggcaaaccgaaccgagtccgggatctgggactcgagcggggtgacctcggcgttttgctgactgttggaactggaggtattgatctgatatttgcgagtatcaagacccaagcactcggcaagacgaacggcatcggtgccaggaattggggcgcagagacgctcaattggagggaatatttgcttgagcatgtagaactcaacatctggcttgagccctgaatcgggcttcagcacatcctgcggggtgtatgatcgcttcgcaggagggagagatgaggtttcagagtctccgttggtcacaatatacgagatgacgtcgttcggtctaactgtcttgccccgggcaatttcgcggagagcgacttgtgccggtggcatgctctctttattagggtactcctggggtcgttttgaaagtttctgatagagcgttagcaaggtgatccagaaaattcttcaggttcatcacatacggtgtatatcacgtatttctgcaccgggattttatattccttcatcctgtctgcaagctcacgcaagtactcgtgaatgttgttgagaacgatttcctgatcttcaccggacaagatttcgttgagtagctttgatgatacctcctttgagagggcacagtattcacgacgcttcatgtcaagacccttgacctcaagtttctccacgtacttgccatccacctcggtaaggttgatagcagcgtacttcttcttggcatgtagtagaagccgacggaagatattgtcgatatcgatttctagaagtcggtaacgttcgttgaccgatttcttgaactcttcgccaaccttgagggcgtcactcatgttgtccatattcgtattgatcatgaccgaatcggtgtcaccataaatgactcgcaattgctggctttcggccaattccttggtgtttctcagaatttcacgtcccttaaaagtggtgagcattgccaaaggacgagcgtaaaatcgactctgtgtgtatcccaagcatccgtacatggaattggcagtcagcttcaatgccaattgttttgtgtcccatatggccagttgttcgggtgtggcacgcttgtctttcatcaacttcttcacttcgcgtcgacgactaaccaacgtcgcgatcaaccgaggtagaacgccttgttcttggtcaggggaggggacatctggcactttttcttcattctcattctcggcctagttgcaaatgttagaaatagaggaaacaagactaggggttggttgggttaatttaccgtagctgttcggtccactgttgtgaagcagatgttgtattcctgaataatactgggatacagactgttgaagtccataacaaggacgaagcggtcgtaaagacctttttcgggctcgaaaacaagaccgcccttgaatttgtccttctttttcttgtcgaccacctcatcatcgtcgccatcttgtattttctcctctgccttctgaagacgagacgagtacttgtccggacagatgtatttgttgcgatgaaactcatgtaacaaaatatactcgttgcgctcggcacgcgtaccgctaagtgtgcgtgcccacgaattacccgcggtattggttaggaccttcgtaagtggcagcatctgaagacgtaaaaccaatgccgcaatgaagtatgtatctgtatcacaatgattgacaaaattcatgagaccttctttggtggtcgcccaggttttcagtgccgcttcggcatccagttcctggcgtacattgccttgaccgaggtagagttggcacatctcagtcaaactccatgattgacatttcatcataagagactagtagctgtcagcattgtgatgtacccactttgaggagaaaattaccttgcccatgtcattggcaacatcacacatcaatcttccagcaatcaactgtctttcggcgaagaagttgccacccttgttgaaattcttaggccaatctccacgcctgagtcggccaatacgatgccatccaggcgtcttcttttcccgcatccggctgagtagaatgcccaggtcgacatcctgcaactgatggcccatgatcacatcggggtccatcttctcgaacatagccaggaatttactgagcaagaactgttcgcttttttcaagaatgacagttccttgctgatttcgtgcttcggcttcaaaatgcattgggtatgatccaccagcagggcgcatgacggtgaatgtcttgcacggaagcttctctggtggagtggtatcagtcagagaaacgtcttcatacacccgggcacttgctattagaatctcctgcttgttctccttgacattgagctgggtacggaaagaaagactcattaaggtcaagggcggggcatccaggttctcggaatctgggacgaggctgatgagagctggtttggtggcctggcattcgaacttgcaccaggatgcattggttactgcagcaaagtctgcctgatcgatcttgagccagcaagggcccattatatttttccagagaacaaactgttcaaacagggaggtattggtaccgaaaacgtttgagaaagtctctcccttagtttccattggcagtgcagccttatcgtaggggtagagtaatttgagatactccgcttcctttgggaccccgggcatttcaaatgcgtacttccgttcgcacggtttcatcttgtgcatgccgactttcagtcttgacatcatctcgtcgacctctgagtaaacatcttgcatgtcaacctcctcttccgtcgctcgtccttgcttgtatcgatattcacgcggcaggaaatagagctttcgcaagatattgtcaatcttaacgaatgcactggtgtatgatccattctgcttgttcttcacttttccgaacagacacaagctgccgttgacttccgtgtagtccagccagaatatgcgcagactgccgtcctcttcgacaacatcctgggcgcgcagctttccaaatgatcgcatttccggagctggactactgaggacgttcaatttgctcctcacgtcattccaagaagcatccattacttctgccattgacttgactggggacgagcttgctggtgtaggagcaatttcacgcttgatcttcgggggcggtcgactgccggtcatgttgatagtcttcgttttaaggctagagtctccagtgacttctgcgacgtccatgaggtcaacatcatcgtcttctggctcttcggccttgaccggtacagtgttcctccgttccaccgctttaataatcggagacgagggcagtatatcgctcatgggaacgtcatcatcgtctgccatcggtagagggccgtcatcgagatcgtcagagtggagtgccgggtccttcattggcgagcttggaatgtgattttcgtcttttgcgtgaagcttctcgcggcgacgcttctcagacagaggcggggagagaacgcggactttgcgtcgggcttctgatttgacaatgtttcgtgtcggggcgtgattcgatacgacattggtgtcgacctctccgagaagatcggccatgaatgcatcgtcctcggcagtagcagcgggcttgtaaaacacttgtcaaaataaggtggttggattccacgagcaaaaagcactcaccttgggtttgggaacagaagccgcagcctgtcctttgttgaagtacttggatatgccattgttaattttctcctttcgctgttgttcctcttctctctttcgtttggcagccttgccccgtgtaggtagttcgtcgctctcgtcactgtcatattctgctgtctgttcgttccatacctcgcggccatcgtccgcgtaacccgcaccgttatcatcgacgacaaaatcatcctgatcaagacgatttcggatgacctttttgtagccatcatcatcaacctcgtcgtagatatcgccctggtcctcaacctcgtatgtggaaagtcgtttctttcctgaggcacggagggccctcagctcggccaacctttcgcgggctgtaggcattatggtttcttcaggaatcactacccattaaactgagttgggtgcctaaataaaagtagattgaattgacgattgttgcggggaaagggaggatgaaaggagtgccgcgccattcatccaggcacgcgaacaccacgcgtcaggtcgcgtttgccctagttaaaggtaaagtttgccggtgagattatgtcagcaccgtaagtgtttctgcctcaggtgatcctagtaattacatcagccattgaatgccttaggcgaacatacccgccctgaggcgatcatatcgtgccctaatatctaagtttaatgattcgcgcaagataggcttcaacatcagaggtggccaggtcatctttccctctttagatttatggtatcaaatttattggaatatatgatgcaaacatacattttaattaccacatgtcattagactataattggctcggatagaggcatatggctgtctatgtgttttgaaacccagccaaaaagcccaaagagaggaaaatatttgcttgtgaagggcgtagttactctatgaatgaataagagactactatgataaaggaataagccaccagtagtataagcctgatatccagggccatcaatatacatacatagtaggtacaatgattaccctactcataatttgatacagctgattcttataacaagtgacctcttgattggcattactaattgacaacagatagttaggtctgaggtacactcagatggtcaatcgatctctcaatgtgatgcatgcaatagtcactaagaccataatattcacagaccgcgatattggcaatctacacctcggcgtccttctgttgtaatcatgatttctcaggtgatgagctacctgcgttttctgcatggccgtactataggtcgctatgttcgtaagtcgctatggccgtattataagtcgctatggccgtaagtcgctatggccgtattataagtcgctatggccgtattataagtcgctatggccgtattataagtcgccatggccgtaagtcgctatggccgtactataagtcgccccggcgatgtaataatttatatttaaaccacagttcggtccctttactactttctctttcatgttttttcctctcctacttctctggctatctttctgtcgctgtgagactatacttctttgatcttcttaccctcgagaggtgttccaggttcagagtccgctgtcatttttctcagctctcacagcatgccggtgagttcaaattgttctctttccatctagtgatttctttgtttctagttcactagtcgctgtggtgtttcatccaccccgtcgcatcatggctcgtttaccagtcacgtccacgaactatgggttgcccagcagaacacatcaagttacaagacacgacttgttagaaaggactttggtaagtcttctaccttgcagtatgccggtgaaaaattctaactggtctcctttgcttcggtaccatgcatgtcgcttccatctatcactccaacgagccatggcttggccatcagaacatagcaccctttatgagacagggagcacatggaatagattttgatgagcattctactcacttgccacgattaaattaatttgactaattctcaatgcagggcatccctcaataccgtcagcaaaattcccacacacgtggcagctgggtatgtacgatggacagacagaattgagctgtttatttgatgtaatgtgacaacttccatttctcgtccaatggcattggcatcccgcaaaatgatgacagttactcactacacagagctccctagtctttactctaagtatggactttgaggacaagaggtgacaagaacagtctgatgcgagactaactatctatctaggtcgcttttcgtatcgctttttgtacttcttactcctcactctttataggaactttatgatagcgactcggctattcaaactgcggacgcgttgatggatttgccaattggatcaaggtatgtcctaacccgtttttgtctaatgatagtcgcaaaatgatgagaattcttactacacaatatggagctccctagtctacggactttgaggacaggaatgaatagaactctgatgcgagactaattaccccaatcaactacctaggtcagatttcgcacttcttgctcctcactctttgtgggagccactcgactcgagctacggggccaatgtgcccgaaagcgaactctcgatgaaactgaaaggatcaagccgatctgggtcaagataaaacagtacttggtttgatccaactgtttgtactatggaataatgttcgaatatttttgctaacactctcaagaacctaggtgtgtattccattttcacttctcgatatgaacctcctctcattacacaagcaaatgaatattgggctcgatgaacccgaaagcgcatgttatgatgagaatatactatggaagtgaccgtgcctcgccaaatgactttccaactggcttacatggtcattcaaggggtcactggacacggtgaaaaggaagataaggactctgataccatgcgagacacaggatattgctttcctggctgatattatggcccttcttgatctgttttgatattggaaacttctgctaataatcttgagatcttctaggtttccatactgcttccaaccccacaagcacaattgatactcggtgccacagaaaggccatttcatgatggttaaaaaatattacactttgagggaacgtggaccctcggagccaatggactcagtgataagtttgaagcacatctgatacaaggcgaaaataagtatatcatttccctgactgatcttgcacatcttctgcacttgctacgttttcttttcttttcttttttttttcttttgacactcgtgatatctagattatcccataattactttcgggtgagactcaatatggctccaatggattcctagcagaatgagcatctgaagtatcggtcaatgaggactactacccaatttgaagatgacgatgaccccgagttttcgagagatcaacggacgcaatcaaaggttgagattgaacactggtatgagttgaataaacaaaaacacttgactttcatgactgacccgtctgtcgttgtgatccaattccacattgggtcttctagttcacactttcagatcaaaggatttcgtctctcttattccttttccatgtaaactgtatggcttgatacaagtaccccgaggattcgaagactagtatctaggggatttgaacatccacggctttcaatggtccgaggggctacagcaacctgcctgagacgcgacaaatcaaaggcttgattcggactaagccgctggaaattctgttttccttgttcgatcccaactccgtgtgttggtatgcagctctctggctggtatgggacgaagatcgacattttcagagtatggcacaatccttctcacgttgatattggaatctctcgactaattgttccgatgtaccactttagattgccaatcacccattcaggtatgacctgacacattcttttttcatctaatggcaattgaaactcgcacatgatgacgatttatcactacacagagcaccttagtctatactctcactatggactttgaggacaagaaatgagaagaacagtctgatgcgagactaattgctcctcactctttataggaactttgtgggagcgactcgacatagtcgtacacacggcggatacattgatggattgctggttctggatcaaggtatgacctgacccttttttctccaacgatgatcgcaaaatgatgacaatttctcactacactatgagctccctagtctacagactttgaggacaagaggtgataagaacagtctgatgcgagactaactacctatctaggtcgctttttgtacttcttactcctcactctttataggaactttatgatagcgactcggctattcaaactgcggacgcgttgatggatttgccaattggatcaaggtatgacctgatataccccgtttttgtctaatgataatcgcaagatgatgagaattcttactacacaatatggagctccctagtctacggactttgaggacagcaatgaaaagaactctgatgcgagactaattgctcctcactctttataggaactttgtgggagtaacccactacggacacattgatggattgctgattttggatcaaggtatgacccgatatgtccctttctttttgtctaatgataaccgcaaaatgatgacaatctctcactacactatgagctccctagtctacggactttgaggacaagaggtgattagaacagtctgatgcgagactaattacccatctaggtcgatctgcacacttcataggaactttctacagacacattgatggattgctgattttggatcaaggtaagtcctaacccttttttgtctaatgataatcgcaaaatgatgagaattcttactacacaaattagagcttcctagtctatacggactttgaggacaggaatgaatagaactctgatgcgagactaactacctatctaggtcggtttacacacttcctcctcctcactctttataggaacttagtcgtgcatactgcgcacacattggtggattggcaattttggatcaaggtaagtcctaccccttttttgtctaatgataatcgcaaaatgatgagaattattactacacaaattagagcttcctagtctatacggactttgaggacagaaatggtaagaactctgatgcgagacttattaccacattcaattacctaggtcgatttgcgcacttcttgctcctcactctttgtgggagcgactcgacatagtcgtgtagtgactatggatgagtgcaaagctcgcgaatgatgaccttttatgtcttctttatttggtgacttgctttggcaagacaacaagtagagaaggcatacctgacgcgaggacgaatatcaagagaggtaagttttccccctgtcacattttcattaacaattggatactttaacgtttttcgagcagtttgaaagctcgcgaatgatgaccttctatgtcttctttatttgatgacttgaatgcatacctgacgcgaggacgatcaagagaggtgaggtttttatccccctatgcttcatggcaacattttcgatcagtatgttttgacaatatcgagacataaggagagaggtaagtttcctattcccctgttcgttgaccatgatcttttaaaggaatatccctactctcatcatcggatggcaccacacttatacttcagtggtggtcgaggcaaggcaagtcttccattccctcatttttatggacgttaacagttagttttgagagaacctttccaagtggatcaaccttcaaactcccaaatgatgaccgtttatcccttcatttcgaagattggcatgagccccaatcaaaacgaaaaaaacttctgatgggagctacacaaggtttccactacagaggattgatctctcgaaagatatgtcgacaacttccctatatcttggctgcagtgcagttctatatctcaaatgcgaagacgcctgtgcttcaagcgcgattgaaatgaacaaaggcaagttttcccttcccctgcatttctgtaaatgctgatttcgggctttaaatgaacacacgtctagaggatgaatctatcaagtgagtgagcctcgaaactcatatatgatgactgctgaattgttcaattgagtcgctatgtcgaatgcatagataggtattggcattaacgagaagccagatctcgacatagggtttactgagaaggtacgttgggaatccccttatgctggtcgaacctgatgacattttcaatagtatcccaagtggctgagccttggaactctcaaatgatgactttaacgttcttattccgtccaagtgactgcattggcaggcatcagtgaaagacaaaaaaaaatctgatgagagttcaatacaaggtcgagtcgcatagcactttaagtgggtaatcccttgacctacagatgatgagcttacaccgatcatatgccttcctacagaatattaccccaacggggaaagagaagaatttctgattaagagaaagcgagagttggccaggagaagacattgcaattcgcctactttggtgatgactgagtcttgtatactccggatgaaaatgtaagctcacattgatgcgtatcaacgatgacgcaagacaatatctgactgatatctagtcccgggctgctttcttgatactggcgaagagttattggagaggttgaggagcatttcaagaggagttgttgcgggaaatgtcgaaagagagccgcggcactggctgtgagtgccagcaattcttttttcatgtatgcatggattcatgttgctcacaccatctggctacgacatggaattgaaataatgtccaattgaactgaggtttggcggtaaatccgagtgacagatagccaatgtccggggtaaacttgttgtaagtatgtaaagccatgaattctatgtggtccagtatgggagagcgaggtgcgaggacctcggtggtttaccttcaaaagcagatacttgccaagttggcgtatggagaacataaatctgggaaaaataagaccaatgttgttagaacactatagccaaaagattccaaaacaaaggcttgaacaagataaaacccagtatcattgagtagattttcctggctatgctaggtatttttttccagccgtgcaggacagcgccagtgaaaaacatatcaacaaggcaccggaacaacaaccagaggttattttcccaaattcctctagcccggtcctcagatctcttgcaagagcggttaaaccgaacaaaaaccgctcaaacatccccgaatcctcccaagtccccagtccaccaagaagtcatggaaacaagtcgtgatggaaaaaacatatgaagacagacatattccatttccccgttgccgtaaacttttctttcccttttcgccgcgtaacaagtgaggaagaaaaatttaacggtaggacttctggtaacgggagcgggcaccgcgaccaccgaacttcttgggctcggcgcgacggttatcggcaaccaggagtgtgcggtcgtactgagcaagagcctgcttcagctggttcttggagtgctcatcgacgtacttctggtagtaggcgacaatggacttggcgatagcctgacggatggcgtagacctgcgaggtgtgaccaccaccggtaacgcggacacggatgtcgacaccggcgaacttgtcaacgccgacgatgaggaggggctcgtagacctaaaatttcgagggtgaattgtcagaaaccgagttcgtagacgttttcccattgccattgtcgcttgcgattcgtgcgaatcttttcgtttgtggcgcacgggaggtggttgagcgaatgtattgtgcgtaccttgaaacggaggatctcgggctggaccagggagaggggctggccgttaaccttgacgaggcccttgccttgctgtaaaaagtctcagcgtgttgtccaattcaatgtgtataagacccccatgatcgcgcaacatgttgtttcgtatatcattccaaaattcaaccccagttcttcgtttcgtgcacgattcctttccgacaatttcctttccagacatttcgaaacaacgtattgggaccgagagagtagaggcgttcatcataccttgcagtgggcgacagcggtggctattgaaaacgaaatatgtcagcgcacgggttcattcactctggtctccggtcgaaaaaaagagagcttacccgtcttcttcttgccgaagcattgcacactcgggacggaagccatggtggattgtcgtgggggagggagtgtgttgtcgagggagatggaaaaagagtcacttgaattcccatacacagtgatttgcccttccgtgcgggtttcgcttagtgtgcgacgctaattctactttgggactagcgtggcacgagacttagggcttggtcacatgaccggagaacttcaatcggggcgggttagaggctacaagcaatacagggaacgctgagatcatcattatctctgacatttaagcgctgagtctgttttggttgctgggatcttcaattgaacgactccgcctttcattaattgtctaattgtccatcgccccggcatatacaccaccctccgccgcgtcaacaagatgtcgcaactcgtcggcaaggtaaatagtttcaatgcggagccttccgggccaaccgcgcatgccctgaactcaagcaagcaactcgattctaaccagtaacgcatcagactcgtctcgcctactcgcgtacatggcactatgtcgacgccggcaccgatgaacgatccctcggccgcctcgcctcgtcgatcgccctcgtcttgatgggcaagaacaagccgatcttcgacccttcaacagactgtggtgactatgtggtggttgtgggatgtcatgatctcaagacaacaggaaagaaacgattccagaagaagtactacacgcacacgacacggcccggtagcttgaagagcatgacgatggatcagatgtttgccaaatggggtggtggtgaagtcctgcgccgcgctgtcaggggcatgctgcctaagaaccgactgaaggatgcccgccttgctcgattgaagagtaagttctagatttttatgctcctgctccttggatgggttgcttgattggtggagatacgcacgggttcatcttcgaagaacaacggggacactatccatttagccgatctacttcttcacgttttgacccagtctaacccaatgtcgtgcagctttcgaaggtgtggcccacccctacaaggaaaatattgtcaagttcggcaaccaatcgatgatcggaaatctgcccgaagtgcaggaagcattcaaagaagccgccgaaaagccaagcgcataaagcacccttttttatctctccttgtttcgttattttagagcgccgacctaaaccgggtccgtgtctacctgtattctattctcctgcgatgttatgatccaaccgcacaagcgcatgggtgtggagtccatttgggatattgcttttgattatctactctgttggcctcggacttttcaactttcgagcctgcggttcttttgaaatgtacttatagcacatacaatcacaataccacgtactatacaatgcttttttaccttatcttttgcgatgttgtgacggattggattcgagatataaagagtctgatcccagaagtataggaaatggatatatgtacaaaatagaaaagaaacccaagctagcgcccatgtcggagctcgccgacaatcctttagaaagcatttacagcttagcctttgggccagcgcggccaacggtgcacttgataagaccgttggggttggattggggggcgtacaccgaggcatccttgccggtgttcttgatacccttgtgccagctgagatctacaagcgcagaggttagcccaaatccaagattcacaggggagggggtcaaacataccaacttcgaagaagtggatattaggcaacgcatagtcaacagtctccaagagaggctcaacagcaagaatctgctctcccatcttgtacatagtcgcctggacggaggcactgttatcctcagcaaaggtcttgagggtaatagcgcgggccgcctcccaagcagcattgaacttctcaacgtgtgtcttgacatcggcaagaccagcgaagcggcgccactgccagtccgcggcgacatcagtgctgaggagacggtcccaggtctccttgagggtcgtgtattcgtcgcggacgaaaccccagaactgggaaccggtgctcttcagcacggtcaggcctctgatagagcttttgatgtcgatgccctttccttcgatgacgtcgacttgcacgttgcgcgtctcggagccaggcttgataaacgagtgcgggtgtggcttgccgtcgatctccatgcgtacccagcggtgggtaacgatgttaacgtgcgccgcgtggatgtggctgtacttctcgatgaagtgtgtgcccaggatcgagccgaacagctccggtggggatacggggttctgcttggctgtgatgaagacggtgttcttgattgagtcggttgcgacaacgacgctgttatcggccttggtgtaactgtggggaccttcaggttagcttcaactttttttctctcgataaaagatgtcgattgacatacgaggtctcgatgtcgccctccagcaggacgcatacggtcatctccacgaccgtctggatgccggtcttctcatcgcggtccaccttgcacacgcggacattgtccttgccgtagcgagcagctgccaatacgctcatcttgaattttgggagggtaacttgggaatatggaagagaagaagaagtagagtgtgaaagttaaatgattgtattacccagcagacctgatcagtatttatctggaatgcatattggctgatccagagagcatcgggcacctccgatggccgcgatggccgcgagtggccgcgatctcctccaaatcccgatcttatcagttggcgattggacagttcattttcttcctacctttatgtagctatggcctgatgcttctatgccattctcacctatcaccatcatatgttgtaccgaaggagaagaaaaagacaatttcctttcccccagactttcgggccacgagccgagtgcagtgacagtggagatctcacattcccaatcccgaacttccgaccactctgcggacttcaactgcaaatgcctagattattttcaaatccctaacatctctaacatccctaacgttctgtataccatccggagacctccactgcggaccggcgagctgcgagccgtgaaagacgaagttccggcgataaacactcagcgctgacatgatattcttcctctgttgacaattgccataataggcatgcgcagtgacctcactgtcggtggtacagtgcggggagaaatatggcacagtctgtacgttgactcgccttgatgacgagatatcgtggcatttttgttctcttttgttcatttaagtactttgtacggaatacaccgaaggtatttcatggttaatgctgtcctacttcaatcgtccagggtagcttgtatatataacctccgtggtgtataccaggttgctcatgcaatttctatcagaggcaatatatatcttcagaggtagtatatatccccccagacaacctacacgtacaaacaccattagagcgcttatttccgatgaacagccggagttaacactgaagtctctccaagactcggcatgaaagagcctcaatacccacagagcacaaaagagtacctatacatacaccgcataggggaaatgcgtggcctacgcctcctgtcacagcatgtgcaagtgtcaagcacactgacctatctagcggtcaacgatgattgccatgagggatttgatttgcttctatatgagtgacaatattacccgaggtcatcatgtgctcaaccttgctgccaacgctccgaccaaagccaagtttcatctctagacagggaataatcaagatatttaactatgcagtctctctcgtacatcctagaccccaatatatgtccaatcctcaacacccatgcccagaacgacagcatgtaggatatgtatcagatccagatagcagattggattctttttttggaataaagaattcacagcgtgcattgaatggcacgcctggtccccagcttagattgcaattgtcgaatcggagggtgtggtgggtgccaatgctggtggtatcgtctgcaacgtcgatctgacgaatctcgcatgcagtgcacacttctaagccatatcaatcagcataatatcccgcgattgggtaaattgtcgagtaaaaagcgggcgaggtctatcaggttctcggtcaaggctgggctgattctttgttcaacagggagtcgtcacttgcctattacgtctggcacttatcgactaatttctggttttgttgattctcagctttccctgaacttctaattagtcacacctcatattagtccgttctcatattagtgattcggattcgcgagggacttctttgtttccatctgcaggcaaccgctcgcgtttcggataatcatgactatacgcgatctaataaatctcaagagagagccagggaaaaatcgtgctccctggctgttgaaggttcgttcctcaacgggttttattatcggtgcagtctggatgtccaccttcacggtatgtgagagtctggtcctctattcttctaagtccccaactgagactcaattgaaataaggaattcctcctgtatgccatggtaagcaagatcttacttatgatgtgagttgaacccagaaccaacgaacgacagatagtccccgtgatgccaacagcactcgtcacccgagccggagtcggattcgagcaccgtatgtctaacagcttccctggcaaactattgcatactaacctttgaccaggagaatactgggtcagcgtccttctcatgtgcgaagcaggcatgtctctattcatgtgtcccatattcggctacctggtcgaccgcgcacgcacacgtcgactacccttcatcagtgccctggtcatactaaccggctgtatgctgatcttacaactggcgcattccatcgctgcgtttgtcatagctcgtctactccagggcattgcaggtgctctagtagtggtagcggcattcgctctcatcggcgacgccgtgtcccaggagcatctcggtcagacaatagggtatcttggctccgcgattgcctcggggttcctactgggtccgttcctcggaggcgttgtgtacaattcgggtgggtacaacgccgtgttctggtttgcgtatcctattcttgcgcttgacatggttatgcggctggttttgatcgagaagaaggtggctgctcagtggactggagaatcaaacgggaacctggagtcggatctggagacggcgcagcgtattccctctgtcggttcgcgcgaaccacaggtcatccaaagaaggaaagggctcgttatcttccggatgctcagacagcgccgagtgttgatctcttcgtgggcgctcctcgcgcagggaatcttgctttctgcttttgatgcggtatgtactagactccaccttttcaacatgaatggttggctaatcacatccagactctctccatcttcgtcgaaacgacatttggctggaactccctcggcatgggactaatcttcctcccaatggccgtcccggccttcttcgagccgctgttcggcggcttcacggacaagttcggtgcccgctttgtagccttcggctgtttcgttcttctctcgcccaccctcatctgtctccggtttgtccaggcaaaatcgaatgaacaaatcgctctgctggtatccttgctcttccttgtcggggtcttcatccacgcctgtgcaccagctatgtacgttgagacgcagcgtgcactcacggcaatggaactcaagagcccaggcatactcggatccaagggtgccgtggcgcagggattcggattgcagagtatgtgccagtttgctggggtgttcttcggaccactttggggtgggtttgtcgagtatcgtttcggatggggggcgatgacgggcacattgggagttttcgtagcgctcactgcgcttccgatgctgtggttaggagaaaccgaggaggagagggctttaatgagctgaatgagggttacgcagttaggcagcacttttttcaaattattttttccaacgcaggtatcagttctgcctacatgtaagcaagtaggtcacttcggaactatacgttgcacctggattacctaggtatagtagcggctttacaaggtgcttatctttgatatatttgtatgcctagaatctctggaatcttttgtatttcatagcctattatagctgcaatatatgtctgggtttgtgtctctcgatctatcaaggtatcctttagaggccgagaagtgaggagttgcgcgaggtgcggcatttgattctatacaaattttatagactagacaccaggagaaaccagataatgtatttacacagtgttacctttatttagatccaggaacatatgataaattcaattcctctactccgtacagcagcaaaccgaagttcaaaaacggttagatccatataacaagccccaccacggtgttaagcttatcgcctggactatcccaatgcggcagctcagtcgttctcttccttttaacttgtttaggctcatcgtcgacattcctctcatctcctcatattgactccattgggatcttcccttcagcataaataacccccaattcgccccgaccattctccccatggcacttcttcactcgatccaacgactaagacaagcatctaccactgtcagtacatcagtctgtcgcattctgtaccacacacatgtgatctaacccatccagatctccttagctcgacctcacctaccggtcatataccaatacaaacccccattccaaccaacccacccaacagcaaccatgccgcccaccaacaaaatctggcacatccagcaccgcgccctctcactccaagcagacagagcaaagcaatacatccgcccagcagaaacaagcacccacctagcaaccctcctaagcttcccctcccgccgctcgaccctcccagagctacacgccaaaacaagcaacgagataatctccctcgcgaccacaatcgcagccttcgaacccgtgcacctctacgcccgatctgaagacatcccacaagcccaagccctcctcgacaaacaaccccagcaccggtccaacataatcctcatcgcagcgccaacaaaccactgctggatccgcgacacaggccccgtctacgtccacagcgccgacccagcagacaaaacccgctacgcaatcgacttccgcttctgcgaatggggccacaaaaccacagaatacatctacggcgccaacgcctcgcccgcagcagcagaggcgctcgaaacatccccgcaatacgccgagtggccggtaatggacgcgcaagccatgagcgagaacacggcgttcgcgggcgtcgtgctggatctcgagaatgcgggcgcggacacggtggcggatgttgtcgtgcgggtggagacggatatccggctcgagggcgggggtattgaggtcgacggcgaggggacgttcatggcgacggagagtagtattattggcgatgcgcgcaatcctggactcgggaaggcggagatcgaggcggagcttcgtcggttgctaggtgtcagtacgttcatttggttccccgggagggtggggctcgatgttacggatttgcatgttgatgctgaggcgaggtttgtgagacctggggttgtggttgtttgtcgtccgcatgagaaggcggagaaggtgcgttgggaggtctattcggagattcgggccgtcttggagagatctactgatgcgcgtggtcggcgctttgaggttcatgatgttgttgagccggatccgagcttcgttcaggggggtcttgctggggaggaggaggcgtcggcggcttcgtatgtgaacttttactttgttaatggtggactggttatcccggcgtttggggatcctgaggctgatgagaaggcctttgagttgatgaagagcctggttcccgggagggaggttcgtcaggttgaggtcaatgccttgcctaggactggaggtgtgctgcattgtgttacacagcaggtggtgtgagggcactagctagctgcctaggtaaatatacagaatctgatttttagaaacggtcaaggaagaatattcaaagatgtgatattgatagtgatgttgatattgaaaaaagaatgtttttgaccatagacttgctagtgtggaaaataaacagaacggaaaaagagaacggagagagagaagtcgaaacgagagactaaacaaaccccattcccacgcagatcataattcatgtagaatagtgtaagatgtatgtcttttttgggcttcttttgtaccagcaaaatggccagtaagaaaccaagatccccaactggaacctgatatcatcctccgatccagattccagacctagaccgatatcagagaacgcagggaagaaacgaagaaggaaaagaaagaggagaacaccgtcccaggacgcctgataatgccgcgccacgaagcaaagagaacgcggacgaaaagaggccaaaaaaaagaaagacgcatagaatccgtgatggagcagtgtcagatattcacatccgatcgagcatccgattgcagtcccaggatgatagccagtcaacccagaacagaccgaaaaccaaaccaaaaaccccataagaccctctcgggaccccgttccccccacatcacgttgatcttatatctcaaagactcaactgatcgatactccccacccgcccactcccgccaagccgccccccacccttcgtaaccatcccgagtcgatagaagcgctcttcgccagcgggcgtcctcccaccaatataccacttctccggaccgatggcatcgcggaacccgcccgagccactggaagaatcactcccgcggcgctggcggtctgctgagccacgattaatcgggatgggagtcgaggtggatgatggtggtgtggaggggagagatgattggtcgtggtgatagtggtgtgaaggggatggactcgggccttggacttggccggctggtgctgtagtcgaggcggatgaggatgtgtgggtgtggtggtgattatggtggttgtgagtgtgattatggtgggctgcggcagaagcagatgatggtgctgatgagccttgggctgagttggctgcttttgttgcgatggcgcgggcactctgggagatctgggcggaggaaagggttgaggttgtggcgccgacttgctgggcaggcttataggttgactgggcgcggaaggcagccaggaagttggcgaggaatggacggttgttggacatgattagacagggagaggattcacctgttgttgattttgattatggaatgtgaagatgtagaataggagaagtctgagagtgcccgatctcaagttcccgatcccacgggcgctccaatcacgggcggcggattatggttatgacgttacataggaagatcccggagacgttatatccatttctccgctactccgctacatcttgtatatacaacgtatcaattgaagtatagatttgaagtaccttgtgaacgtcttctccaaggtaccccggcttccccagatactggcacgtcaaatggatcataagtctatttctagctgcttttctagtaaatcctgagaataaaacaaacaccttaaatcacacctcaaggaattcccaaagcacacatatgtcctgccatgccgactttacatgagaaaagaggccatgcgatgcagaagaaaaaacgagaaaggaaaagataaaagcacatggcaaaaaatggactgcaagaatgaaagaaacatggcaattcgacaacaaccatcccataaaaaagagaatgtaagaaaaaaaagcttttctcctttctgatgtcgagcactcgcgcaaaagatgaacacatgcccatgtctatgttgtggacgccgaacaaaccaccataccatctgcccctcacatcgggggttcaagataaaagataaccagactcgcaaaccacttaagaatgcacacccacaccggatgggatcagaatagaaaagaaaagaagatagatcgacaaacgtggaacgggagacgctagatcacgaaacaccgcaagctgaaagccgcaagcgaacggatcaaaggactaccgtaaacagatttgttgaaacatcgtgaccagtggatttgcaccagcggagaagccagggacgaagccctagaaacaatagaagagagggtggagagcaatagtcctacccacggcgtgaagaagagaggaaccttttgtggtattttacttagtcaaaacgctttttcaatcttatgcctaggcatcatcttgctttccgaattcaccgtctattgtctcgcgggctgtacattacctgcatattttttgttagaaaccgatatcataatcaacggcataaaaaaaaaaaactaaccgtctccgctcagcgtagtcgaggcaaggtacagtccgttcataccgctctcaggaccggtcgaggcagggtagtacttgcggtcgtggtcgacgggagcgtggatcggctcctggcccgcggccatggagtggggaaaaccggggttaatgtaaccgtcggaggaaccgtgctgaaacatcgaattccagtcaacacccgggtgatgtgagtggggaccgggcatgaccggcttgtggtcatggtaaaccgggggctttacctgttcaaggggacgatcacccgtcagctgctggccatgagcatcgacaccaggctgcatgagatacgggttctgcttaggtccagccatccacgaggctctcgcgtgcgcctggccagcggagaacgcgtcgtcaccgggaccacggttcatgccgttgacagactgcatcgtgaaaccgagcggctgctgctccgcgtagctaggacgacctgtagccattccattgccattcacggccccatcgtattgcgtacccataacgccattggagtgggggacgggattactgacttcatcctggagcggcttagggggattggccgcggcagccgcagctgcttgctgctgagaccgcttcagatgggcctgcgggtgggacaagtgggtcgctccggtcgggttaccccgtcggatcgagcatttttggaagtgacgcttcaagatatcactgcgggagaaagtgtccttacataggacacacatgtaagggcgatcaccagtgtctatacaaatcagacagtcagcacatctcgtcctaagggaatttttctgttttttcttctttttttttttttcttcgctctaccgaaaacttacgtctcaacaaatggcgcttgaggtgcttagcgtggaggtaagtcttgttacagtgcggacaggggaatttgccatccgcgtcctttgcgggaatcgtcgtgctcttagctgtaccattgacaccgttcgaaaccggagtcgcgcggcccgggacactcggcaaaatgccacggcggccctgagagcccacgacctgcgtgcgtggcggttccttggcgtagggggagccgttcgcgccattcacatcaggagtcataccccaacccttgccgtcggagtaactaaaggcaccggacggaagaccattgaaatccgggcggcgatcgcgggggggtgccggagcaatcggctgagggtagctctgagcggaggatgcgggcggaaggacactcggaggtggggggtactgctgatgcgcctgtgtttgagggttaggaagattcaacagagacgatggcggaaggctaccgacagtcgtgtgcggcatcatcggggcctgggaagccccgtagacatcgtgagttgacggggggtaccgcgacaagtccggacggtacggctgccccatgtagtggtgaggcgcgggagactgagggtggtgcggctgcaatggaggcagagtatgcggctgcgaaaccggatactgcggctgcatcgagtattgtgggatatgcatgctcgagatgggagtcgaggacatgggcgtggagccgggaggcagactggtggatggaggacgggaagggtgagatctgggatccattgtggacagaggagggagatcgtgtagaaaagaaagaaaggatgttggttcacggtaactcaatcatcaaccctgcactctggatgattttttttttctttgaaggaaaggaagctccttgtttgaaaattttcctgcgaacaagaaagacagaggcaaacggtcacagggtctcacgggattcacgggattcagactgagttgactccacacgaagagagaaaggaaggaagagatgcttaattgaagaagattccccacggtcacccactaggaagaaaaaaataggatggtgatttatccgcacgttgtgacaaccaccgtcgatggttctgtatccaccgaagaagcgggcgtacaagtgggtctcttctctcgcagcaaaaacaactagtccgagatctgcttcgcgtcaaggtaatccttgagatcgaggaattgagccaatagaatggaagtatcttaaagaatggaatagaggaattgaagggttcgagaacagggaattgagtgattgaagatttgaggattgagaattgggaattgggaattgggggaaattggggaggaaaagagaaaatgggggataagtttcttggtaaagacgaaaaggaaaattctaaggaagaccggatcgaaaaaaaggaaaaaggaaaaaaaagaccgaaaagacgagaaaagacgaaaaaagacgatcgttcctcggggaggcaagaggcgacagacgaaaaagaaaatgcgaaaaaggaaatgacacgtaattaccgtatttttgcacttgccagttccaaatttacacggccgtcttccgaagtatggccgatagcggtagggacgtattaggattgttgggatagatagtttggatattgaatattctattattcggattggattgagaataacacgaatagcgaataaccagccgaatcactttacacatagacacatagacacgtacttcagcacatcgccatctctcactggatctgcccacgtccgggtacgatgacgcacgtaaggtatatcccatctaatcacccgtggacggatgataataagtcccgaaaccattgaactatatcatatgcaatccgatgattccagagatagtagatcgatatatcgtgaactttgtatgtatgttgtagaacaaaacacaaggttcactgcgatatgctacagcccaagtcgggatccctccgatcgcggcgattgccagactaccattgggcagaccgctaacactgccaactattaacacatagatatgccgttgtgtatgattatctgatgttggagtagatcttattatatttggagatggagccatctccccgaatgtggattgtggttgaccctggctcttctttgttttgggctccgcagtggctgacagccccgcaagtgacatctgatatgtattcaaccattactctgcggactacggagtactctatgtctatatatctttgagctactccgcagggaatataatgtaggtagatgaggtctcagactgtataattccacccttcactaatctcttcaaacacgttattcaggggagccagaggaagagctccaatgagctcgagctcgacctcgtcatacatcctctgttgtactggatttggctcctgcatgcagtctagatgtacatggccatggcacatctggcacatctccagaagaaggtgcatgcgttctcgggctcttcctggaagactggcgaccggggcttctgtaacggccatgcagtgttgccgtagagtacttaagtggatgcgctgtagccgctctttgcactgctttccgcacttagcttgggactcgaaaaacatgacgcgaattgcacttcgtatattgtacataaaagaaaacaagataaagctatcaatggcacaagtctaactgggagactattgctgcctagacaatatagagaaaaaagaggagtccgaagtagagtgtttttgctcagttcagccacacaggaatgctctagacgaatttggcattcagggggttccccttattggacgtggctacttccgtgggctgacataggtgggctgcggttcgcgtacttttgcaatgcagatttcttattctattattaagccgatatctcgaccgagtacggagtaacatgacctaaagtttcagatcctgcgcgccattcgagtcccgtgtgactaaaaacatacgttggtcgcattgagattggatatttcctcaacaataacaatataccttggatagactcaactatcaacatgcaaagaatctacatcgcactcctgactccttactccgtatatttgccggtgatctgtattccggacccaacatccctgcccctcctgctccaccccttcgcaagagcttctcccgcttcgattgtggacctggaaggcttcgaccagggttctgcagaaatattgaactgaccacctgatcttaactttgtgcaccctactttgggtgttcatggagagattatccttcactattttattatactgacatgtgcgaactcagattccgccgaggggcgagcgtgaattcaagctacgacgtaaaaggaagttcgcttgaccttccactacctcggtatgtgtgtacgtgtatatcagtccagtcaccgctagaatatcgtgtacatcctaacagcgtcaaccgaattagctgcatatcctgtctgttgtcctatgtctcctaatgctgcctaaaaggatttcgacaatcaaggaaaaagaattcgttcttggtggcttgaacgcggtgtattgaagtagtaggtggctgcctctactttttgcaaaatgcactcggcatcaatgccgggagttaacggactccactccaaagccccccgaaacggttctcaaagtacggtgaggcttttcccgagtctttacatatggaatcggatcaggggctgtcaattcatttgttactaatgttttcttagtctgttactgagaccagattgttgtgttaagactagtcggtaccaacaagccggagatcgtcgcttggtttttccatgaagagcttgaccgtatcctagtcgaataatatgtaccaaacccactaactgacatggggccgccaatagagctaaattcccggatgcttaaggtgctgctggcttcagtacggagtacggagtagcaaccgggatagaagagaatagcgcgcgcgagatgtagatcccgccccagtctccatcgctgccgaatagcatatcacgtgtgatatagggttgtgtatacaacagtggcattatttaaacaaagaatatagagcgataaaaaaagaaagggacaacacgtcaacgtgttctacacgctctatacaacgcacatccgatagcgctccccaacatcatccgatacacacaaaaagccagcgttgttctcggcatatgccggaaacaccgctgaagctaagtccggatcgccgagtttcaggaatccacgcagccaatcagggacgaccatccggtgcagcgggggagaggatcgtgccaccaccaacctcataggctgccgatgtctgtagtcgaaacccagatgggcatagcgtgttcttccacacaaggtcctcttggaggatctgacttgatattatttgggatttttgatcggttacttgcgggctatgcgatttggtttctcgttccgtctacagagaatcgaaggtttgatgttgactttgaaattgactttgagaactgatatcaagtatagtggctaccgtcccattctccctttctccatctttctccattttcccatgtgttctgtggatcggaatccattcgggtacaacatgggggttatggggtggctcacggtgatcaggaacgaattcgctatactaacatagtacctctgtattcttccatgttccatataagtaattgccttgacctggccttggaatcaacgtgtaccagtgaaaacctcccctggccgcgtcataggtttcggatagaatttgatatgaggcgcatatgtgattcgcctcctattaatatctgatactcgtctcgctaccatattctgtggccgaatacagtacaagtagggcaagtatattgtgagccttggaatcctcgatccacaaaccgtggtcgggccgaaccatctgtttgcagtgtaacagggattattgcttgaacaacccatttttattagaatgcataaatccaagcgtctaaaaagcagcctatcggaccgacgcattggatgagaaccccaataataatacacagtcaaaaaaaaaaaaaggaagtaagaatacctaagaaaaaccaaaatctcagttcacaatggaaaaaaggcaaaatggtcccgatttggaaatcgtaacgtacaatacggcggtagactcggctcacccccgacgaccccaaaacagccacttccacgattgccacctctctgacgaccttcttttttattttatttcttcttttccctcggccacggttcagaccgctagatctgtcaaagaaccaaaaagagcaactccagacggtccacccaaatccaggaaccgccaaaaaacccatgggatccaaatcctccaacccgacggttcaaaggttctgggattcgtcataacgtacgccgtacgccgatcccggttcctggggggccttcctttttactctcagcccctgacagtgacgatcgggactgcgtgcaatcagcccggacgggagcgggcttgggtggacaagaggggcctgtactccgtacaagggtcaccccaacacgttttcttcttatgtattcttactttccgcattcttgtcccggttcttgtggttggaggcgctttgagtttttcgttttttctttccttctgtcgattccaaggtttttgacttttgagcaaattatgtactcgtgactatgtattcgttctagattagaaaatatgacaaggaaactgcgcttactattggacgctatatgtctttgactcttatggccgacacgggagtatacaagtgggaccccctattgttatagtaggctcctcgtgttaggggggtgtgggctgtgccccccccttcatctggagtcagattaagcatatctttgttccaacccttttttttgtttttctccgtggcatccatgttcagtgtccaccaccgccggtggggtctcaggggtgggtggtggagcttacaggattctccccggggatcccagcgcagggcacgttgtacaaggtacttggccgtgggggaaggtggttgctgggtttcccgtactttcgggattgggttaggtttcaaatatataacctcgtgtccgggcttgctctgggggtctatgcattgattggcttggtcggtgctttctcatagggcaagtggtgtagattatcccgtcatagagaggtactgtgtacaaagtgtattcgagagatcagcaatttgcatggttattctgcagcgtatattttctgcatgcttggccttgaatacgaaggactattatctatggtgggatatgacgtgctataggcctggactaaccctaatgcagctgtatcgttatatcatgagtgccgttattctgcaacccctcggttaaatcgtatacatagacgatataaaatctgcagtcgctctcatccccagaatgtcatatggatgtcatatagtcaaccttatccagacatttggaactggtggagcagtgagtttgctccatttgctccgtcacatagtctaactcacgccaggaggggcactggggctccatatcattctgtcggatcgatccatatttatggagccagatctatgttattgtttctgacatgcaggtggcgaatgcagacattcttgacggtggattcatctagggccatcactactgtttacagatagaagtctctgcacgaagacggagatattttccccttccgtacattgggtcgagagttctgctctttggttggtggtagtagtaccgtctgctcgtactagaagattgaacatatcaaacaagacgcaccgaaaaatactttggaaatgtaatgacgtgccccacgaggctataatattaagttatgtaccaacatatatcaaatcttatctcaaactaatacattgactgctccacaaaccggagatctagataggtttatctgcatcatccgtcttggaaaatgcagctgcctcagtctctcgagactcaggctcaatgccctcgctaacgtacggctcctgctgaatcgcatggatagcatgctcgacattgactacaggacccgtgaaccagcgatgggcatcaacaaaccaccaaatcgtaaccgccagcatcggcgcaccccaaacaagacaagtccagttcatcatatcaggcgtcaggtctttgccagtaacactaggcaaacacaagatcgggaccatcaaaagcacaaacaaaacaccaacgccaccgatatacgggccaaagggacccagatgccaggggccccgacggaaccgattaccgacaaagaacacgcgaatcgtgatgggaatggcgaaagcaaagaactgcgcaatagcaccaatggagaacaaagccccaatcgccacgtctccagccagaataagaagacacatcaagatgccgaggacggcattcagcacgaccgcattgaccggcgtctgcgtaaccggatgcacctgcttccagtaattcgagaacgggaagcagtcgtcacgggcataggcatacgtaacccgcgacgcggcaaccatacacccctggcccatggagaacccacagataatcgtcaaggccaggatagccatcgccgtcttctgcggcatgacctgcagcagatacgacgcccagggctgtcccaggtcggaatccataacggcctcgatgtccagcaccgtgtatgcaaccaccagctgtaggaaccagcccatcagcccgcccacgccggaggtgagcacgatcgcgcgcggcgaggcgatgttcgcgttcgagcactcctcgctcaggtggaatggcgagtcgtagcccgacatcgtccagatcacgccgacaaaggtcatgaggacggcgactccgtctgggaagtcggttaggttggttatgtcgccccagacttgtttggagggtgtggatttcgggctgttttttgtgccggcggggatcatgatgatgactgcgaccagggcgatgaaattgaatgtcgagccccatgagttgaactgcgctacgtgcttcgtggacatgctgctgatgccggcgtgcaggatcattatgagggtcgtcagcaggaagttgtgccaatttgtcggggtgtattctgggttgttgatcgaagctgctgcgaggatcattgcgctcagcgagtagttgaccgatggcgctgcggtgatctgtccgatccagttggaccagccggtgatccaggcggcgaagggtccgtagcccggaggtgcgaggactgctgcggcgtagtatagtccgccgctgtatagacgttagccttctgaaccctaactttccttggatgtgatatcgagcagtgtatcatacctagtcggcattgccgaacatagctctgccatcgacattgctatgcactggataaatatcatcgcaatgatccaaccccagaccatacccgctgttccggcatatcccattcctttaatccagtgtcagctataccttgaacccaatcttcaaagcgcagatctgtgagtactcaccataccacagggtactcgcaaatgacggtagcaaccccagaacagcaaagctgacgcagaaagtcgtccatagcgagaactcgcgcttgaactcttgcttgtaaccaagcgccatgatcaccctctcatcggcatccatctcatgatccgtgtatggcacatcgccatccgggagaatggaagtgacttgatctttgttgacctcatgatgtcctttggatatgtccgacgaggcagtggccgttttggtctccatgtttgcgcccatgaccaatataaataggtatggcgctcttaatgtgtgcgatatatatatcaacgaaataaaatgacaaccatacaggggggaaacaggaatgtcttcactttaaaccacagccgagggaagtcggagcataataaaatagcacagactaatggtttttgagcaagtcgacaggggtcagccatgttatctatagcacggagcattttgcgtttcgccccgcatcaagacatgggaagcagctctctacgcaatagtacaccttacaacgaggtgagataagagtcaatgacatatggattgatgtggataaattaaaaaagatagaatgaactgcacaataaagaggtattttattcgaacacgcgatggcctcactgtgcaggcttgtgatttgtagggacgggagataccaccgctgattcgaggcacagggctttgacgatcggtgctacgagcttggtagagagaagtctagtcccagcaaggaagttccaggcgttatacttcacgggacttctgccgtgagacagcgttagcgcatcagatctgcttatcaacctaatgacagagataagggcttgactcgccaggcgtccacgggtgtcggctgtgctgattggggatctgttcggcgttctgaaacctccaggactgccattataatttgaggcttgttatctaaggttggacttaccttgttggggaaaaagggctatgcattgaatgccggagaacccttgtttgtggtatgtatatgtcatgaatacatgcatatctacctagtcccaacgacagcgctatctatagtaagctcggaaactattccatggaacattcggatgtccgacgtatatactccgtgagagtccgtgttcccgagagctctaggtttttcagccctatgaaggtgaccatatttactttgaaacaacggtttctatgtggtattaaaaacaaaatactttcatcgctattctacacagtacagccccggcctgtccctcaaaagctctgattcatatctatcgaaggagagacaggtatataccctcgcgaatgattcagaaggcctaagaaagtcagcatcatatccaaccctccaaatcaaccgtaattgactcacattgtcctcaggggcgatggtgcggtcgtagtagttatcgaggaaaggaagcttgcggagaatgtcgttgcgcacacggggaacctcgccgaagatgaagagggcaccggaaccaagggcgacaccgaagccagcagcgacagtaccactgttgagaacgttattagcccctgtatcctatccaaactggatagtcgaatgcgggatgtactcactactggacggctgtgccaagggtcatacccgcgacggtgcgggggatgtagtacctgcagattagtgaggcgttagcttggtgttctgcttgcttgattgatcggtcttcttcgatatccagctcttttgtcaaagcccatggtctgctccccacggatgccggacatccgtcaagctccgctgcaagaggagaaagacgggaatccaatcaacgagaaaagctgtgttggcaagtacaaggccatattttatttgctccatccaacgtgctgattgccgaccaacgtgtactgtccggggttcgaataagaagggtatgggggagtctcacttgggcgcataggcggaggcctgggcggagacctgggcggcggcgcgacgagcagtaggggcgaactagaggatatatgttagcaattgacgtgacattttctatctcgttttatcccgcggctcggaagccggttgtgatactcatggccttgtcctttagccggagcgcgaccaagtaggcaaggaaccccggaatagaatacggggatttctcatccatcgggtatgaaagcacttaccattttagaatacaccggagtgatttggtgggacaattgctaggagacaagagctggcacttggtggtcgacgaaaaccgggagtgcccgagtttacacgtgactccaaagccagtggccaatcagaggaggcgtaattgttttcgctcaagtatgaggccgagtcaatggattagttttattaaggagagtccaaattttagtcttacatcctgttttttatgctcaggatggaaaatatactaccacaccagatatagatggcaaaagaagtggcacctgacgtaaaaagaacaaattgtagatattaatgcgttaattgacttagcactaggaagccttgcggctcccaagaagctaatacgcctaggccccaaaaattcgcgtgatagctgaaataaatggaataaaaagatatgtgcttcaaaaccccttgatctgacatgcaagggattcaactaagacaggattgatcgaacaggcgcacgaaaggaaagcagcaatcaaatacagtggaaacaaaagattataagaaccacgtagccaaacaccctaactgtacatttgtctcattagtcgactttgtcggtcgagcctccattcaggaacccctctttgccatccaggtggaagaagccaccgttgttggtggcggtgttgccaataataccgccgcgagcagcactacgtctcagacgtccacgtccgaatatggtagccacagcaaccacggcacccaagatgatgaagaagaggatgggatgactgccgaggagggatcgagcaaagaaaaagatactctcaaaagtgccgatggtagatttgggtgacaacttcgaaggggaagcgatgacgagaggaatagtctcgagaatagaggtccgtgaggccataataggagctccacttgaagcagtatcccagtagcggcggttctataggaagtcaggtatagtgcttaaacaaatctcacgagggaagacttacatcttgatcattgataataacgcggtcactggtttccacatcgataccgtaggttgtgcgcaaccagcgttcccaaaagtcgccgtcgacccaagcaaatgcgacttgcttcttatcgtcctcgcggatcgtaatacgcatgtttttcgcagcccgtagtgcacgctgatcattgcggtcgtcggcttcttcgatgcgcagttgcttggaatcacgaagttcagcccgctcaaggcggaagagttgaacctgcttgtccatccattcaagagctgcttccttcagttcgcgcttggattgcttaaagtcatcgcttcggcggcggctgaggagtccgagaaccacgaactttccgtccatgatttcttgggcgttggatgcggtgagctcaggtacgatgggcagccacacagtctgcatccacgacaagatttgacggaaatctctcatgtccttaggagcaagggcattatagtagttgggacgtccgtcacggacgactagaagacgaggccaggtagagatcttgaaccgctcggaaagaggagcactgtcagacttgacaatgcgagcgtgtcccacaagactaagggtgaggcggttcatggcctcgaaatcttcagatgtggtcgcgtggtcgtagagatacaggaacagaacctcttcggtttcttccaacttcttaaaagtagtcgaatcaacatcctgaatgctcgagcccacaccgacggctttgttggtgtatgcgatcagatcacccaagccacgaagaccggtatattcaactctctcgccgccacggaagaagtagatcgtcgggtaggcattcacgcgagcatcttcgcacagtcgcttctcaagatcgcagttcacttcgccaacattgagagtatccttcatctccttggccatcgagttccagttcggggccagagcttggcaatgatggcaccaaggaacgtaaaacttgatgatccatggatcgtgggtagtcgtaacaagactttggaaactctccgcagtgagtgggatagaaacgccctgggggttagcaggccgtccttggagcttggccttgacagactcagcgctaacgccttccaattccgcggtctcgatgctctgcttctcgacagctgttttagcgccaggctttaccactgcaggtttagcggtcatttccatgctctcagcgccggcctttgggatttggatgccttgcgaaggtcgggtcccaggcttgattgtctcgagtttggcttcaatcatagcggcaatatctgacatcgtcttggcacgcgcggggggttcgttctgaacgcccatatcatagaacgcccacgcggggtaaaattcgacgttcagcttcttgcagaaatcgccgaaggcctggcagtttatggacccgaaatggagattatagtagccagtgaatgagtccagagacgcgagctcatcgggtttcaatccggagaggaataaaggatttgatgtctatcactaatcagatccaaggctcaaatgttgaaataaggggatagattctcacgtagtagtactcatacagggtctggtacaatggggcggcgatccggcaatgcgggcaagagggggaataatgtttgatcatcctagaatagttagagccttgagcggtttattgattgctgcagaagggattctcaccagtaaccatctttggtcacttcgtcgaaattctccggggtcagctcggtcaacgggggcacttcaataccattgaatattgtgggtttgtcggtatccactccacgagacgcccttttgacaagtgtatttccagattgttggtcggaagcatctgaaggcgtacccaaagcaggcgctaccaacagtgagaggagggaccaccccagccaagacggtttcattttggtaaaagaaaaaggcgaataacttggatagcagtttaaaggagagtataagtagtttcaagatgtcaaagctgagcaaaacgaaggactctggtcgaagtagggaggataatcgcgaaatgttacaggtggcacattggacgggggcgaagactggcgactcgggtgggcactggtcacgtcgcagaaagaagcagcacttagcgactatagcgcccgtagctgagagcaaaatagaactgcacacagtccaaacaaagaaccagatgtgaggctttgatggtattcggcaaaggtaagttgttgcgtttccccctgccgtttcactatggaacataaagttaatccgctccgggccgacttcaccacttcatctccctggaacagagcgacttcaatatcaccaaatccattcacaatgcgctccacactccggctactggccaatgtcaagccccggtatttggagccttttgctcctaccggattgacgggccttttcacccaccccagccctcgccctactttaatctacctttactcgactactctgcagaagttgcaggcgttccccgaatcctccgcctaccgccaatccgttgaggctttgacccgacaccgcctccaagtcattgagtcgcaaaagcccgccggattcgatgcatggttggagcgtgtgcggaaaaccgtggcagccgaacctgagcggtttgctaaggtccagcactccgacggcacctacacccatgccgctgcccaacagaaggatggatccgacaatgctcgcggtgaagaatgggatggcgaagccctctcagctacaaccgagggtcccgcccgtaccccgcaacaagaaggagaatggcttgaaatcatgaatgaggctagcgagaccaccgacaaggccgatcatgacttccaccacgaacatatcaaatgggagagcgagcctgcgcttgatgtcgaccagtatgtgtacctagctttccgaattgacctcgaacaatcgcgaatctaacgctaatctattgcgcaggatctctcacatcgaacagcagatcggcgccggccttattgaggagatcatccaggtcgcagagacagagctcaagcttgtggatcagttggccgaggccaaggtgtaagtggaaatttgaagattgtggtttagacttcttgctgacacttttacaggtgggaggaacttgaggaaaagccccaacccggccagtggtcctacttcgagcgtggtcactaaacagcaaatctggaatggctatgaattttaatctctgtaactactactagaggtctctttgtttgaatacatgttttgagagttcaaacatttgaaattttagagtgagtcgtagagctaccaagctatgattcgcatattcgacgaatgaaggtataccagcaatttctatcggacatgttgatctaattgagacatgtctatagcctagtatataggcaattggtctttcagtttcaattttatacatctgggtgatgattatgtacagcgaagtatatcgaaagtatttgagctattgctattttgtccagatccatacttggaatataagcttacatttcaccaatctcacatagcaatccgtatagctttcttcaatgcaaatgaatttgtaggacatttgtatagcggatagaccgactagaaggcggtgagccaaggcgggaatcccttgtggacacatacattgctgtccctgaatgaagcgcactccctcaagctctccttcatctcaatcctttcttaattcctccaattaataacttgccccgaggatcgctcctccctatcattgggctgtttgagcggctcgcgaaatctcctatcgctgtcacaggcccaacaccgcatcacacaaacactcgtctcatcccccacacaacatgcggctcgacatcaaggtacgcacgataaaacgtttcatatagttgcaaatctgctcttagcacatacagtgatatgatttcgcaggtgaacgtccacaattggagggattgctgacgataaatgttacagaggcagctgtttgcccgctccgagcgggtaaaggggattgatttccaccctacagagccgtgggtaagctttttcaattcactcagtagcttcgctcaaactaatttgattcttagatcttgacgaccttgtatagtggtatgttgagggaggggcagtatgcgagacgtacaatgcgctaattactttcctgtataggccatgtctacatctggtcttatgaatcgcaggtaaggcctgacacagatttacactccctatactctcgtctaacatgtctaccctgtagtctatcatcaaaaccttcgaactcaccgatgtccccgtccgtgccggtcgatttattgcgcggaagaactggattgtctgcggttcagatgacttccagctccgggtctacaactacaacacatccgaaaaaatcacctcctttgaagcacacccggattatatccgttctattgccgttcatcctacccagccgtttgtgctcacagcctccgatgacatgacaattaagctttgggactgggagaagggttggaaatgcgtgcaagtgttcgagggccacagccactatgttatgggcatggcaatcaacccaaaggataccaacactttcgcctccgcatgtttggaccggaccgtgaagatctggaacctcggctctccccatgccaacttcacactcgaggctcacgagacaaaaggtgtgaaccatgtcgactactatccacaggctgataagccatacctcctcaccacctccgacgacaagaccgttaagatttgggactacaccacgaaggcactcattgcaaccctcgaaggccacacaagcaatgtctcgtttgcttgctatcaccccgaactccctgtgataatctcaggttccgaagatggaaccattaagatttggcatgcaaatacctaccgactggagcagtcattaagctatggcctagaacgagcatggtgtgtttcctaccagcggggtagacagggaattgcgatgggtttcgacgatggtgctgtcgtggtgaagatgggtcgggaagagcccgccgtctcaatggatgggtccggtaagcttatctgggcaagacacagtgaggtcgtgtcgtcagtgatcaagggtggcgatgctagtgtcaaagacggcgaacccctttctctaccaacaaaggatttgggacagtgcgaggtgtacccgcaaaccctgtcgcactctcccaacggacgttttgtttctgtctgtggtgatggagaatacatcatctacaccgcattggcatggagaaacaaggcctttgggcaagctctcgattttgcctggggtgcgaaagacaacagtaacgattacgctatccgcgagtcatcgacaagtgtgaagattttcaagaacttcaaggagcagagcgccggccttgatgttgggttccaagccgagggcctctctgatggtgtccttctgggtgtgaagggtcagggtggcattggcttctttgactgggagactggcagcctggttcggcgaattgaagctgacccaaaatccgtaagtttgctctaccttgatatttggaaattatgctaatggacacgtacaggtctactggtccgaatctggtgaattggttaccctcgcctgtgaagatgatttctacgttctccgctattctcgcgaggattatatcaacggtctgaacgccggtgaagccgacgaggatggagttgaggcggctgttgagttggttgctacaattaacgagaccgtccgaactggacagtgggttggagattgcttcatctacaccaactccacgaaccgcctgaactaccttgtcggtgaccagacctacacaatctctcacttcgaccaaccgatgtatattcttggctacctgcccagggatggccgtatttaccttgccgacaaggacgtcaacgccgtctcctttagcctttcgctcagtatgcttgaatatcaaacagtggtgctacgcggtgatatggaaatggcatctgagctcctcaaggatgtgccccaagaccagatgaacaaggtcgcccgcttccttgaaggccaaggatataaggaaatggccctggaagtcgctacggaccccgagcaccgcttcgagctcgcccttgcgttgaacgatcttgaaaccgcactcacgattgcccgcgaggccaatgttgagcacaagtggaagattgtcggtgatgctgccctggccggctggaatcttgctcttgcccaagaatgcttcaccaatgccaaggatgtcggttctttgctgctgttgcacaccgctagcaacaaccgcgaaggactcaaggccctggccgctcaggcctcggagtcaggcctccacaatgtcgccttctctactttgtggtctctgggcgatattgatggctgcatcgctctcctcatccaaaccaaccgcatcgctgaggcagtccttctcgcccagacctacaagccttcaagcgcccctaaactcgttgtccaatggaaggagtccctagagaaatctggcaagacaaaggttgcccgccttatcggtgtcccgcccggtgcccccgatgtcgcctctaccgatgacgatctcttccctgagtgggatgagtacattcgcctagagaaagagggtaatgtccccgagcccccttcctcagagtccttgattgatatcaacggcgatgaagaagaagaagaggcagaagcagagcccgtgagtgcgaccaatggtgcactcgaagcggatgaggaggtagagaaagccgacaaggctgcagtagatgaggccgatgctgccgaagccgagtgaacgaacaaaaagcaccgggttctgtttggtgacttttcaggagagttaggttgatcgtttgttttctggctgaccagtcagttcattcttgattgcgagcggcgtcttaacgtgtgtccgactttttttactctctcttatttgtaattgcgctgtcatgagtctctggagcaaattacatgcctagatacaagcaacatgtttccctttatttctagtcatttcttggttgttttattagatcattgtacatgtactaggtactaaaccggattctccttggtgcttgggcttgtatgagctcatactctgtgaacgttactgaaggcttctagtgtctagtagtaaaaaagacatgcctgaatgggccactgtctacctgctgccctgcggtgcagttgctgtattctggtcataaaatagaatacaccacgcacttcgcaactgaaaccgcccagggacgtgatccatcctactcggagactaaatatgatgcagaactgtttgggcattgtccatttgagagttttatcgagaatacaggacaagggtgcagacgatgaccgcttgagaaaagcaacgaaaccaagggtaagaaaggaacctgcctagagagaatgaacacttgagatggaagggagatgaccgaacaagacaggaaaatcaaatcaaagcgctcaacggccatatgaaacgacaagaaacaatgtcgtctcgaagatcaggagcgcctccgatatcaagatgccacagactccgttgtgatggaaaaaagaacaatatgatggacagagcgaaaaaagggaaaaagaaaagatcaagattggtcgatatgttaatgaaagacatatgcgcagttagaaaaggaaatggtctctatgaacctcttgtctctttctcgcagcaggaattctcgatctaatttgacgcggcgagaatctctactccgcaatgctaccgaaggacgggtctttaacactgccgcctgcatcgccgaggccagccacgggtcggttgtatgaccatccggcaaactgttgctgcatggtttgcgacaggacggggccatcgacatatgagtcctggggcgcctccctggtgaattcaacatcaaagttctcagtatcacgggcatccacctgcattaagttagccacatgttggtccattgcatgatcaggagtgaagaatacataccacgtttggtcggaagctgggttcatacttcctctgcagaagcttacgccagtcgatgttggcaaagaagtggtgagacttgatctccgcagcaccgttggcacccagtcggcgcacagggtcacggtccaacagtcgactgagaagatcccgcgcagcaggcgggacgatgtcgctgctggggaaggtcaaaggctcttgcaagatcttacgatacatttcgttggtgttttcatcatagaatggaggcaggcctgtcaacatctcgtagagcaaaacaccgagagtccaccaatccacagtcttggtgtagccgttgccaaggagaagttctggagccagatattcaggggttccacagaacgctaagtttggttagatatgtagggcgtatcatgagtggtgagatcttactattggttcggtcttcatctttcatgtctagcttgcagagaccgaaatcgcaaagagcgatatgcccggtgtaatcgagaagaatgttctcaggcttgagatctcggtagatgactttgaagccgtggagacactcgagagcgcacagcaactctgcggtgtagaaacgggctcggttgatatcaaatcgttgctccctttgcaaatggtggaacaactctccgccgttcacaaatgctaacacgaagtacagcttctcaggcgactggaatgaaaacttcagcggaacaataaacgggttgttaatttgtgcaagaaccgatcgctcggcgagtgtgtgtgtgacttccgatcgcgagataatgtgagccttgcgaattgtcttgagggcgtagatccgaccagtatccttcttcctgttaatccccgactgttagaagtttggacccatataagtagatatcgagtcaacctacatgacctgcatgacctttccgaaactacccttgcccacaaccttgagcaaatcaaagtcttctaatttaagactccgctgcttgttctccacaaaggaaataccaatcttgatcgagccaacgccaaattggagatccagccactcagtaccttgatgaccctgttgacgcccttgctcatcatgagctgcggcggccttctggttatccttcttgctgagcttcggatcctccacatatggctggctctcttcaaagcgagggttgaccttgcatgcgcccaagaagatatcctcactccgtccggcaccaggccgggcagcagggttgcgcagatacagctgtacattcaactcggtcttccgggacacatcgaacttgaaggctgtattatcaccagcccacaatgggctctctggagttcccgaaacggcatccacaaagacctgattcttctcgaaatcaaggagggcatacggaaggtatttggtggaatagcgaccgtggatagtgggggcggcattgattcccccacttgtggactggggtcggccagatggcacaaaggaacccgcttggttctgagatgaatgtgacgaagaagaggtacttgggcgcagagaagaggacgcgtaagagttattttggaaatgcgagttgaagatctgttggaagtgaggtgacaacgaaaaattgcgcccttcgtggagagtgacgataaggattcctgggttcacaggggccacaggaggagatacaagagactcggaagccgctatcagaacgatggactgattagttactgggggggaattctagtaataagaacaacataccgatcccgttcgttgatggggtggcggagggcgggttagaggcgacaggtgtcagagcctcatcaccatttgagtcacccttgatcgtcgaagtagacgacgaccggccaaatgatgaggtcaagggcgccagatgcgtctccttcaactcttcagacgagttggatcattagcgactgcctctggtccactgcagtgcagagaggggtattgaggggggagagagggagaccaactgccagtaaacatacttttagtgagcttccaggacatagtggcggttgttgtaaacagatcgaaaagaagagatcaaagtccaaggtaccgcaatgcgtgtgcagggtgctaagaatcacacccaataatcaacacgcaaatgccccccaaaataaacctggagagccacacaaggacacagatgataccacgcaaaaggaaaggagtcaagacagagacaaccaccactatagcttttgaaatccgaatggaagcacgactaaggataagaagaagtcggggagatcgaagatcgaatgagaataagagaggggaagtcccccctgtaattataatacgaagtatactatagattacctaatattacctctttgattggttgagctggtcacacactggtcactccaaggtacagtaattaatcagcctcagccactgctccgccacaagggttaacgacgcatcaccttccacgacttgaacaatcaaggcagttgactccacagaacgaggaagtttgagatccagcttggatttgtattggtatcattttgcctactctcccaagttccggaatattccccgctccgaagtgcggagacaccttccccggaatatctaacctcaactttcacctgcaactccagtactctcagactcctgactctgtttctctcgataccgcaccggacaaatcctaggatgaaagggatggaaagataatgggtgtgatacgcaagaagaccgcctcgcgcggcaccgaggccggcaccaagttccactgcgatgtgtgctccattgatgttacgtcaacagtaagtcttcatgtctgtcatggccatttaaaggtctgttgttttgttcagagactaatgcgattccatcgcataggttcgcatctcgtgctcgcatcccgcctgccccgaatatgacctctgtgttccctgtttctcagccggaaagaattccaagaaccatgaccccgccacacatccattccaagtgatcgaacagaactcagtccccatattccaggcagattggggtgccgacgaagaactgttattgctggaaggcgccgaaatctatgggctgggttcctgggcagacatcgcagaccacattggcggctaccggagcaaggatgaagtgcgagaccactactacaatacatatgtgaagagcgtcaactttccgctcgcagcccgtgccgatccagacgatagggccttgcaggattcgatctccaaagaggattttcaaacacgcaagaagcgtcgcatcgaagagcgcaaagatgcagccaagacagcacctccaaccacaccaaagcagaagccgactgccagtgtaccggcgtgtcacgaagtgcagggctacatgccgggacgattggagttcgagaccgagttcttgaacgatgccgaagaagcggtgcagcacatgacttttgagcctggggctggattcaatgaaaatggcgagccagacgcagagaccgagctcaagatgaccgtggttgacatctacaactcccgcctgacagcgcgaacagagcgcaagaaaatcctcttcgagcacaacctcctcgactaccgaaagaacaccgccttagataagaaacggtccaaggaagagcgagatttgttgaacaaagcaaagccactagcacggatgatgaactgcaaggactttgaagacgtcaacaagggcttagagtacgagcacaacctccgcctagccatctcccagcttcaagaatggcgccagatgggcatcggtgacctaaaggcaggcgagaagtacgagcaggataagcaacagcgcgttcaacgactgcttcctcaaggatcatttgaccgttttgccagcacccgccctaagcagtcacagctgacagagacacccgcggcagcgattcagcttacaacacctgaactgcctctgcgactgcaaaaagcggccaatccacacgcaccagcggactccaccgaagaaacactgaacgatttcgatcgcgccttcgctgtcgatggggatgcgcctcccccgcagccggcaaagacgaaatatgtggtgcctccattaagcgggatgccgtcgtggaagctggacaatgagactgctgccgatctgcatctcctgaccaaggaagaggcagaagtatgcaatgttctacgcctgatgcctaagccatatctggtcatcaaggagacactgttgaaggaagcaatgaagcagggcggcaacctgaagaagaaagatgcacggatgatttgcaaggtatgtttctcactcgactcttgcatgcggactcttactgattctgttagattgagggcaccaaaactagccgcatttatgatttcatggtacacagtggttggatcaacaaggcgtaggtgcgccagatccatcatacgctgtaattgcttctgagcttattgatatccaaatctatttgtgatttcgttcgggggcgtttttttttcggcgttcataaggaacttgggaggtgggcggatgtattgatctcatacggcacaggcaggttgatttatcacctgcaattcgtacaattgtacaatgcatagtaacatacagctatcgtctagtgtaaagcaacaaggccatagaacacttctaaagccatccttgatagagacgtagtaaactatcccccacactcctcggtcctcggttctccgcatctgcaaactacccccaacttctgtcgatcacctctagtttcctatatcatttccttaattaactcttctttctcccctctcctcaataaaaaatcaatctctcctagaaataccaagaaatcaaaatgccatccttcacaatccagcccccgaccccagcccacgcaaccctcacctacccagcaccccacatcctcctggttacgctaaaccgaccccgcgatctgaactgcataaacgcgcaaggccacgcagacctccacgccgtctgggaatggctcgacgaagagccgagcatgcgcgtgggcatcttaacgggaaaaggacgagcgttttgcgccggcgctgatctaaaaggtgagcgcagccatgtctacatacatacaacagcaaatatcacaacaaccgcaatctcacaatcccctaatgccctaatcccctctccaatcccttctaacaaaccgctaactcaatccagaatggaacaaccgcacctcatcagcagcaacaacctcaagttccacaacgccaatgccaaacagcgggttcggcggactagcacgacgcaagggcaagaagcccgtgatctgcgccgtgaacggactctgtctcggcggcggcacggagatgatcatcaacagcgatatcgtggttgcgtcatcgcgggcggtatttgcgttgccggaggtgaagcgtggggttgttgcgcttgctggggcgttgccgcgacttgtgcggacggtgggcaagcagcgggctatggagatggttcttacggggcggacggttggggctgtggaggctgagaggtggggacttgttaattctgttattgggattggtgagggggatggggacgaggagattggtcgggctgttttggggaaggctttgggggttgctgggcagattgcggggaatagtcctgattcggtgcttgttagtcgtgagggagttaagttggggtgggagggtattggggcggatgaggctacagcgatgttgaatgatacttgggttaagaggttatatgagggggagaatatcaaggaggggcttagggcttttgtggagaagagaaagcccgtctgggtggatagtaagttgtgagattacttttttaagagaaggatggcaaaggatattgattttccattcgctattcatagttcagttcagtcagttcagtcagttcgtaaagtcatataaaacactgatcccattactcccgcgccgtatacctggtattcgcgatattccatgcaagttgaatttcagtcaaagcgaaatcaaatgcgcggttgccctgcctctcttctgaaatagtgatgttaggatgttgtgagaaggcgcaagaaagaggtgcctactttgcgtcagattgtacgcggtccacgaccttgaccacgtgggggaagagagggtggtctcgttccaagccggtcaattgggcagcagcgtcggcaggcgagttctccttgaggaccttggccaattccacactctcctcgtcaccttccacattctggaaccgcatagccatctcaagagagcccatcagtgcgtcaaactttccgccacgctcagccagctgggcagccgggccgatgaaacgctccttgcgggacagtttgcgcattggggcacggcccactcgctcgaccgtgtcctcaaggtagtggttggaaattcgggtgatgatggtctcgacgtactcctgctgctcggcggcgctgatctcatgtttgtcgatgatgagggaggcagtctcttgaagcacgttacggacaatgccgcggatgcgagggtccttgagggcttcggcaatggtcttcttgccggcattgtagccatagtaggccgcagtggcgtggccggtgttgacggtgaacaacttgcgctcaatgtagggctccaggtgaccgacccagtgaatagctgggatgtctgggtgaccaaactcgccgaaaggagtggactccacggcccattcatagaacttctcgatgcgtacattgagaccgctgtgggcgggctggccaggtacaatacggtcaatggccgagttagcaaaccgggctcggtctggcatagagccaacacggtctcgggcggtgttgtctttgatgaactggtgtagagtgtcagtggcaccgatagcgttctcacaggcaatgacggccaacggtgtggtggcggtgcgggcgtcgatacccttggcaatgacgggagcgataaacttgaggatgttcggacccacggcacaggttacaacactggcggttgagatctccttgatgacatcgctctcatgggtcttggagttgattgcacggtagttggtgatggtcttggtagactcgccctcatcactgacctcagtgacctcgtaggacttggtgttttgtagagcagtgatgatgccgtccatgacatcgacgaagacgacctcaaagccagccgtgtggaggaactcggccacgaagccacggccgatgttaccaccaccgaagtgaacagccttcttctccatgtttaagttgaagagatgtgggagtataagtgggaattgaattggaagtagaagtagaggctatagtagagtagagtagagagagaagtagaagtgggaggagaagtagagtagagtggttaagactaaagaggaagtcgtgtaagttgcagtttctccaggggaaagtgcagctatttaaggaaagagggggaaagtagggcagaaactatgaaaaggcctaggactatgctcgtcccttggaaatctcacgatgacttcatagatagctcggcgacgggactaacctccgccctgtttaatgaggacatgatgaatatttcccatccctgtattattgctcgattatttacttgtaattctcgatttcgctccaatattctaaacaaagaggattattgacccgagagatgttacattccttcttcttcctccccccgctttcatgtctgtgcaactccaaccaccaccgagggcatacagacaatacactattcccatttgagcaacttataggtttcgtttcatgcgcacgcttgaaccattcaccggcaaaagaaaagaaagcaccgggaaaacccgcccatattggtcaatacttcgcgctttgacgagaatcttggcgactacagtcggaaaatcagccgggaaaagtccaacggagtacagtggtcctaggcgtctgagccattatatggaaactgggtatattggtttgaggtataatacatggttactccaaggaaaattcgagactcttcacgatattcaatagaacctcaactgatatccacatgcggtgacgtcggatgaacggttgacccagttttttccccattaagtagcggccaactccatcaagccgaggtctttattcgaagtacgtctatcgccttccacgcgctctcgctctagccccgatggactatcagatcactgcctggtttgcactgcccaacatgcctgagcccctggaagttagggggaaaaaagcctcaccctcgaggtccctccgggcccgaccattggcccctcagatatcgcaagccggatgggcaattttgcaatttcgctcgaaactagttagattggccactgttctctattggttacgcgggaagaatctgatgggtgatatcattcgattcataaatggctctctatctactataggacggattatatgcgattctgcgagtttccccgatctccgctcccccatctgtaacctgcgctctccgactggctaagaccaccgctccctgtgctgattacccctctatatcttttgagacggccgcaggcgcatatccagcccgtttgttaacatacacattcacaaagcaagcaacgctaccggcgagtaacagccccaccgcggcccaagtcatcccaaggaatttctcgccataatgggctgtcacgttcgagcccctgccgtgggcattaattagagcgacgaattcaaaggcgatgaccgttgcgattatggatgcgacgctgacggtaaaagacccgacctaattttatgatatcatggtcagccatttgcatttgccgtgttctggggaaatccgaactccgaactggaaaatggaaatgcaccacgctgaactgggaagtacactccagtactgcctgcataaacgacctgcacaggcagagtttatgtagggggctaactcgatcaccagatcgtgttcgtgtatatgtcactaactcaccatgaaaaaccaaaattcaagcgggccctggcatgcgcgcggagcgagagtcgtccatactcgtacaagcatcgcagcgcccatcgcgccaatgccgatacagtacatcaccgccatgacttggcatgtcattctgaacgcgtggaagtcgtcgctgatcacgcgctgccacctcatatccggactggaggtgagctccttcggccaggcttgtgtcgggtcaaatgaggatgaaatcgcgcggttcgagcattcggtcacgttgcgcgtgacttctgtgcctgggtcgatggtcaccagtgttccctggcagtaggacatgacgtggacggaatataaatcgcgcactccactgccggtgctgtctggtgtgtagagctaaatggataaagggggtcgagtcagtcttctgactctacctgccacttctagagagtatttggagacggtcggacttaccgttaagatatccacatcgtcgaggaagttcctctgcgtccctgagaagagacataggagggtgagtataaacgcgacgaacactgccaccgtctggaataggcccttgaagtccgacatgacggcggatcgggtgtatgcgttggtctggttctggtggtctgcaagatgtagttggatccggtatgcagcctctggggatgaccacaacagatgatgcggaggctcgatattcaatgagaagacagacacccgaatctgcgattctcgcccggttcgcgatccttatatacataccataatggaagcgggatagccggcacgatcggggtcaagatttctcacgatcgcttcattccagacgtgggctgttagaaagggcggggacacatatattcttcatagtagtatcgagagttaattcttcgtggaatgtatgcattgcccgtaattgcatacagagcaaaagccatacggagcgaaagcctacagctattcgaaatgtaagtctggagtagccaggtatgatggctgggaaggggatgagcgtggtcttgtgctcttcaggaatgttgggaatgttaccagccacgaaggatcttgcatgtcgatatcgtacttgtgttttattagtgggatctggcattgatgaattagtttagataatattagatatgacttgagcatgaattgtatctatgggctggttgggaatatttcaatcttagagatgaggggatgtgccagggctatatattagaccccaagagaccccaagagaccccaagacatttgacgtcagcgacaagggtttcgtacttattgccttggccatagacctttttgcacatgtttttgcgctaatctccagattggttcagcatcctagaaattctcggcacaaaaacctcaattctgagtcagtcgggatttcagcccagatcgaaatttacccgatcaagccatttgccttgtttgagtggaaaacaactaattattatggcaaatgttgaagaaataaggaaatactcgtctcccaatacgatttgacttacttatgttcctgtacggcgtgttatcatcgaacaaggggaagtgtagtccctggcggagacttgttgagtataaacatttatggatcgctatctctagtttatttcgattgcatgtttactgctgaccttgtcaatttgcgatcaaaaggatcactgcatgaatttgatcaactatgttcttcagtctgttcttctcgctttcccttttcttcgttcgccttttcctcctggctcttcgattgttggtggaaagccaatgtatatgcatccgggtcccacgataagactctggtattcatctcttgcagcttgcgatctaaaagtagttccatctcatccttttgtccctcatccaacagatcaaggcgttccttccaggcgtcctcgatactttcggtaggtccaaaaaatcgcgagtcgatcttctgccaatatataccatcaaaagcaaagctgtgcaacgctgcgtacagaatccagaagtctccactctcccagctgtcattcataggaccggagagttgctgatcttctcgcaatcgaccctgttggattgctatatcttcacaattcttcatcgctctgaggaagatctttagacgacatcgaacgacctcgtccagtcatcgaggccctttggccagtcctcaggcttctcaatgagcagccaccaaggtggcgcataagagaattcagtgggtgctgcgtacgtgaactcccagtccaccacgccggcaatatgcatattctccttgaatagtacattagcgggccttaaatcatcacaccaaagtttgaaaggctctttttcgagtaacgggtttgtaggtttcttatccctaacgagcttgcgaaagagctgccgcgccacaaatttccgccgacagtcgtctgcagactgcaccgagtcatttctctaatgaactaaatgattgatgttgagttctgcaagcgcttcgatatatgacgaagatgtgtcgaatgttgtatgtaggccgggcagtttcgaccgcggtagtccccctagtcgaacaagttcattcatattcattgataaaggccgaagtactacttcccaggtgaagtcatcggtctggctaagggatcctacgcgaggaaaagaggggatagagagttgaagcagtactcccgccagctgcccatacagcatttcaagcttatcttcgtcgatatccgggtctaggattccacgttgccctttcggacatctcggtgtgttaagagagtcgtgaattttcgactcgtggtcaatataatccataataataaatgagctgagaccgaggggactctcttccttgtacccgagtgaagaataaaaggaacaggtattgaagtttggtcggcgaggaaccgcatgacggcgacctcattcacgactttttcctcggggaaaaggacagcaccgggctgcgatagccggatcacggtggcaccatttcggtactttaaccgcaaggatatttctgagtatggcaaactcggtagcaatgcctctgttgtgagtgaggatgaaatctgcaatcggtctgaggatgtcaacttcaagaaattgaacgagccacttgtcagacgtttcctcggcttattcccaggccatatcgtcagggcacatttgagtctgcatatttgcctcttgttcaattgatgcacaataagattagtgagataaagccgagaagagggccggaacatacagggttgtgggtttttttagattttggagagacagggttattacatgactattgggggctcctagcaatcggcagagtcagactcatgcagatgcccaaggggaagacaggaactctgccaaaagccgagggaaaggacggggaaagagtttcaagccaggagctcggatttcccggcccaagataggagaacagtatccacaggtcgaagaatctcatgagaggaggaagcatatcactgccaattcataccgttctagctcttgaagagtctgctactagtagacatcttcatattcaccgtcttcatttcgttgatgtagagtggtcttctcgtttactgttcggatctgttcctaccatttcctcccacgcgatgggcaaatggcgaaggagcaacggcgaattctcattgaagcttcttcattaaatatatttttgcatttctagaaggatgcttgaaatagaaatgcgtctctgcaatgtcgcattgactcggagaccatctcatctctaaagagttattactgttacctcaatctgaaggctccgctgtgaacatcctgacgaatcaaatgcacttttcggggtaaccttgaaatctcctataatagtaagataaatctaagaattatatagaaaatgtaaagtgtacatcaaagacaccacatatattgcatactgaagttcagctcttgcttcaaacatagttacttgttggttcttttgtcattgatactagtaacggacttcatctacactcgatatatatcttgctatattcacatgtctatgacaaagtatgcattcgcaaaagggcaacgacacacgacagacattgccacattcagatgttcctgttcctatcatcacatggctatatcatcacgttaccattcacattaagcgagactatgtcgttgtttgtctcatttgtgaatagtggcataaaccgaccgcccttaggatacctataagaaggtggccctgcccccagaacttcttcttcttttctttcttcttcagctctctttgcctctggcttagatcaagtgtagtatctgttcttgccagtttaatcgctggtagttctgcattgcagaacgtcatgattattccaatatttggacctcgcgacttggcctctgtgcttgcacacgcctcgttgcactgtgtcactgggcttacactacccccggtcgacgcgaactccttttcatcaactgttcggcttgcccgggcgcttggagaagatgtgtgcttaggatgtacgtccttgccaagtggttccattttataccttgttctgtttcgtatgtatattttgtaactacccatggtagagacagtctcccaggcaacaataatgaatgtgttgagactgtttctgtcttgggttggtgagacctgctccctaccatgtttgaacaccaatacaacccatggcttccttccccatcagaatggcatctctactaccccctgcctacattgtatcccatgtttactgaaattacaccataatccccgaaccagggcaaacagagttaccatacgtaattaccttccaaggtcggaatttttgacagcaatgatcaaagtatctgatgtaatgcatatttcaagagaagcttgaagctgccaaggaattctacaactttcaatccaaagttcttttccatctattcaaccatctacgatctgcagaaggacttgtttcactctagatcaacctgaagtctttccgacttggccagctcactattattgggagcactattaatcaaagacaatctcccatagaggtctgctttctggatcctaggtagaacggatggcagaacaaggacaagtgatcttcctagctcatctggtttgatatacgtgtaacgccttgtgtacattgttgcctgctaggcctgagttatagagtcgagttcctgttggtgtgaacaaacctagtgtgcgatagttttagtggtggtttttcatggtttcttgcttctttaaccattcaattcatctcatattgcgtgcactttgacctgattcctcagtaggcctcgtatcattagagatgtcactttatcttctgtcccctaagctgagggtcatatcctttgcgaaattaggagttccaaatgtattcgttcagggtgaatagcgaagattctgctgaacctaggaattggctcacggccaacctatttaggacatcggagacattaaggttctgaatggattagttgtggaagttgcacatgtgatcatctccctctagggctgaaattggaacatcggatgattatataaactgttagcctatcacctgttcatggatgaattagtccgtgccaaagcagggaagtgtagactgaccctaggagattacacgaaaagaacttgcaatgcaacgtatgtcgaaagttgataatgacacagtcggataggatgagccattaatatctgactcaaatgactttgccaatcagatcactaaacgagggaactttgtataagactaccagtgtagcttttagcgcgccctatggggatgagttacacaaccacgtgaagcaacatgcataacaaagagatcgaggcaaaataaaacaaagtcactagtacccggacttgaacataagtttgtggtgccgatgtgagagaagtgtcacctgggccgcgacactaattattgattattctgaacctccacgggttcgtttgagtggctgtatgaggttcggagataccgaaccctatgtacgtacctaaggttcctactcggttatttcgtcggccgatgtcgaagtagtgctatgtaccccgtatccgtacccatcatgggacgacgcgacgcggtctggacccacagaatctgtagggagtacggagcagccaagtgcttaatgcgaaacagctacgggagggcagctggaatagggcaatcttcctctgctcttctagaaggcgatgtatgccgtctgcaagctgcaagggcggcattccagacggagcatccacgagcaagacgaaataagcaaaggaattcatacatgtcttcattggtagccgagattagtatccacgcaaagcatagcatatagcgcaaacccccgaaccgaaacggaaaaaggggaacttgggccgaattagactgccgggcgcatctcatacgcaaggcacatgtgtggatacaaaagtttgtctgatacattcccgaggatcctaaggtaggggtgttgaccgagacatctaaccacatcaaaccacgcgtgaattccaaggttgacatgtttagcgctggcaactgaccacgcgaaatgcgagcacgtgcgtgttattatcaaattcaacccgtggccgaccaagccttgtagaagctcacttggcgacgcctcgccgggacgccttttattgcttggtggtcttggaatttcttgggatgatgcgagcgacaagagcaagctttagccaagagcctaggaagtcttgacatgtagatgctcgcatgtctcgatttcagatgcgttcgtggtcccaaatcggtcgaaagtatacaatcctagtattgatagacgcggatttcgcgtggcaactcgcattgatgttaatctaatcgatatcatcgagtagataccccggctagatcggaatgtagcacaacagtgacatgcaacgcgccaacacgtgttggaggtaagttcagatttcgagggaaggtgcgtaaaatggggttgcacatgttccaatgcggcccgctgattggccacagatcatgcatggacgatgtcggggttcccaactagcgtggaactgcctcagccactacgtcaatattaaatggtccagatgcggcccgttttgggacttggggttccatatggaagagattaatgggagagagattgcttgttcgctacgaggcggcgtagatattggacaatggcctcagaaaggctgcacgtgtgtcaaagcgtgaatgttattctgcttggaaccgagatgacctccggctccgggactaggtgtttggaggttgccacttggcccgaggcatccaattgcattggcattgccttggcgtgaggtgaggtttagctaaggatgcagtctatatagatcctgtccattgtcgatgcttctgcatataacagcctaattgtagatactccgtacatgtatgtaggagtaattatttattaaacatctaactcaaacggtgaacagaatttatcggccccgcgaaagtttgggaagatctgccttgaaccgcaggcggtggcaagcagagttgggattctgcccccacgtgcgcgtttgattggtctccggctgccccatatcagacccaccgggcccactccgccccacttcaagtcgaaaatctgcttccggagccaaatccagcaagagtagacccataaccgcaccgagacagggccccggagggccctgaccccgagatagagtggttcctaccttctgactttccaagactttttttcttttttgccaattttttctgagtttgaggtggagacgccactgaattgtgccgttgcatgtcgtccacgctccggttcgctcacttctcactccttcttcctccatccttttccatacttaagaagtcaatcgccgcctttctgggttgaagtcactcaccttccccaaccattgtggtcacttcgacgcttccctcccccgagttgaagcttacatcaagcaaggttcttgctcacgcgacacatctcagtacactcctacgatgaccgactttggtcctcgtgcccctcatgggcccgacatgtcgggagaccataacccgctggaggatatggatatccatgagaagggtgctttcgattctctcattcgccccgacgacagttacacccccgagggtgtctactgggccgatctcccattgtggaagaaaatcacattcgtcacctcgtacaacaacatggaggcaaagcgagagctgggtggcatttgggctatgatgaagaaagaccctctctcgcccgtctcctggtacttccgcaacatggtcctgcctggtgctggtctcggcctcgagggttacgtgctcttctctatcggcaacatcaagccgctgttccaatctgccttccctgattgctggaaacacgccaaaacctgcagtcaagggtggatctacgccattgactacctcgagatcatcggtatcatcgtgggtcagatcctggttggagtcttgggtgactggtaagctacaattggactcctcgtgggaaggagaccgtattaacgcacgactaggctcggccgtcgatggggtttgatccaagacgccgtgatcatgcttctcggtcttatcatgttgactgccgcctggggtgtgacccagaatggctggatcatctgttacgcttggtgtctcttcgtctacggtatcggtgttggaggcgagtatcccatgaccgccaccgccggtatggagaacgccgtcggctctggaaaggtttccaccaaagaagatcgtctgcaccgtggccgcaaggtcaccagtgccttcctgatgcagggttggggtcagttcttcaaccaggttgtgcttatcattctcctgctctgcttccaccacggcagtggtaacaacccttactccaccgtcgctgttcagtggacctaccgtgtttccttcgccattcccgccgtcggtactttgtggcttgtgtactaccgtgcctaccacatgaaggctgctagcaagcaacttactgctgccaagaagaaggcctccgtcaccggttatgatgcccagtctctgaagctgaccttcaagtacttcggattccgcatgttcgccactgctggcggctggttcgccaacgatgttttcttctacggcaacaagctcttccaaagcgagttcatcaaggttatcagtcccgaaactagctctgtcatgcctacctggctgtggaacttggtcaatgtcggcgtctctctgtgcggatactacatggcctctttcctgatcgacaacaagctgtacggtcgcaaatggatgcagatcgttggtttcatgctctgcttcgtcctcttcgtcgtccctgctttccacttcgactactaccgccgccccgagaacatcaaggccttccaggctatgtacttcctgagctctttcttcaaccagttcggtcccaattccgtctccttccttgtcgctgccgaggtcttccccacacccattcgtgcctccgcccacggtatgtccgctgcctggggtaaggccggtgcccttctggccgccgtcctgtacaactacatcgatacccagaccaagttctacgtcgtgccctggtttggtctcggtggtgctctgatcaccgcgctgttccttcccgataccaccggtctggacctgaaggagcaggagcgccgctggcaatgtctccgcgagggtcgcgagcatgagtaccacggtcctgccgtgcaccccaagcacctgtcatggtacgagcgctacgtcctgcgcaagtcccgctactacgatgccgaacttgactaccaacagaaggtcaaggagtaccgcgtcgagtgggagaccgccatggctgccaaggtcgccgagaagcaggcccacgagcatgacactgatgaatcgcttctcgagggccacgtgcacacatacttccaccgcactagccctatgttcaagggcatggagaagaatgtgtcttccaaacaggataccttcgccttgcctcccgctgcggagagtgagtcctcggatgcttccacccatgagaagcattcatgagaagcattaagcggctagtttgctcggtcctcaggttattgcctgtgatgtgaccatgatacctttttctttctaaagctagctatgataattccccctttttcaaaatttcaattttttctcaaagaaccatgcatatacaccaagtcgctttttacctttatgctcgctatatgaattgcatgacttttgcttgacgcaagcgagacattcgattatttagatatttataccacttttggacttattgctgtacatcttatttttgaagaccgttcattgtagtcaacaatcttggagagatgcctgaggcagagtggctgactaacatcatattctcctccacctgagacatcgatggatgtatatgaaccgaaccgcacacttaattaaatccgatgataccctaaacataaaacccaaagagaaaagaagagaaaagaaaagaaagaaccatgagactcttcgccttcggctctaatggatcaggccaactaggcatcggccacgaagaagacgtctccacaccaacgcaatgtctcttcgagcagccagagccaccacaaaacaccaatctccccgatggatcagaaatcatcaccatcgcagcaggcggaaaccacaccctgctcctaacaaccaacggctccatctacgccgccggctgcaacgcagacggacggtgcgggccgcacaaagcaaccaaaaacccgaaagagcccgagtccgacaacaatggaaacatcctgcgcttccgtcaactgatcatcccagacgcagtctccgacacagaagtatccaagtttaaacatgtttccgcgacgtgggagggcacgattgctgtagcgtccatgccacgacgcggcagcaataacaataacaataactataacgtcgtctacggccgcaatccaaatccagatacagaagatcgagtctttgtattcggctcctcgcccaaaggggaactgggtgttggtccagacacccctgccccagtcccaggtatctgtatcccctcgttcccaccagcggggttgaggatcacagcgctggcgagcgggatggcgcattcggcagctgtgctctcgaatggggatgtttatggctggggcgcggcgcggaagggccagcttggggaggagaaccgcggggctaggattgcttattcgcctgtgaggatttgcttgccgttttttgcggaggctgttgcttgtgggagggagtttacggttgtttcggggcgcgggcggttcgttgttcttggggatagggagaatcggtggggggtattgcggattccggaaagtttgtctttgcgtgtggatggaggtttgggggatcatttacggggtgaggatgaggaagggcattgtgaaggtgctattcgttatcgatatactggtattgcggctagttggcatggggtttatgtacatgctgcgcctgggctgggacggatggaaccgtcgataacggacggggcgttatgcaccaagtctcgatttgattctgattctgattctgtctctgtcggtggttccatcgttgcttgggggcgcaatgatcgaggtcaacttccgcccccggatcttccgactcctgttagactcgctgttggtagtgagcatgtccttgctctcctaggagatggtcgagtggcggcgtttggatggggtgagcatgggaactgtggacccgatacagattcacaagggaatgtgtcggggacatataatgtgattccgctccccgaagccgtaggagtggatgggaaggttgtcggagttggagcgggatgtgcaactagctggattattgtgacatgatcgccggaatttgggagcgtcaaaggttgttgacaactgcactgcccctgacagggtgtgtgtgctcagtcgaagaaaccatattggcgaacctatcaactatcagcatacgcctatcaaagtgtcgcaagagccagaattcacatacctgagaaaaacgttgtgttggcgggagacccgtctcatcgtttggctcatcctctctcaacaaggcaggctccgcatcgcgaatagttgccccgaatgcgtcctgcgcgtttgtttagccacccactatacccactggggaagaaagaaaaccacatacctgtgttcccgacgcatcccatccaagaatatcctgcggctcctcttcgtccttcatctcatcccactgccggtcatcatcagcaggcacgaaaaggctatcgaattccatcgaaagcccagacgccgccggccgatctgcgctagccctctggctcagattctcctgcgtagacgacccattgagaggacggatggatctggttcgcggtggcggtgggggcatttgcgtatttgtcgtcgccgatgggcgagtatcacgcgacctgctcgctgagattgggataggcacgggcgtttgccgtgggattgacgctcgtgttgacgtcggggcgtcttcgctatctgcctggccgcgggtcatgactgtgaattctgcgttgatgccttcaaatccgtactccagctgcagaggcttgcagggtcgggtgtaccgtgctgttacgctggcgtttgccgtttcggcgtgcgcaactacggctttgaagtctttcaggttgatcgcgacgtgcatattctcttcgaccaagtactcttggaagtcgcgcgtgtctgctgctacggatgtgtggactgggtgttttagtacttctgtttgggttgttagttaaaaccgctaagatttgatggaggcgaactcgacatacccttgccttcggtgatctttgttgtgaagctcgtgaacaccgctctgccggaatcggagtacatgtccagctgctcggcagataagctgaagtgctcaatgagctgcttgaggaaccgtggatcagctgtccacatgctggtaactctggatttgtcgaagatggcatgctgaattgccgctggttcgtaagtcaatttatatgacttgatcacgcctagataaattgtcagagatgtgcagtgaagccaaaagatggatatatgcaagggtatcttacctagtccacagatcattttcactgtcagtctacactcggcttgctgtagatcttcatgcaattccatgtcacagcgttcaacggctgtgtccttgtttctgtcagttttcccacgaaatatggagagaagtgcctgtattctatatcagcataaagtaaggaagataaccacggtaaatatgcggtatggtacagctccaaggataaaaaagtctatactcactttgttatagatctggcagaagaatcggtccagcgaaacactgccacttctgccattactgctggaattgaaagaatacgcctcaaagaatacccccttctcgaacgcgaaggaggcaaaccccgtcttggtagaattgagcgcactgaggcggagctggagcacggttagccagaacatttcatctgctggcttctaaaccttgaactgaactaaacaccccaagttaagaaagataacttacgatatcaggctctgcttcgatggcgactgtttcgctgaatttggacaggcatattaaggcgtcgtggagccggaccaaggctaacgggcctaacgacaatgagagcgacgtcatggctgcgcctcttggtggctatcaaatgtgttcagcctagaaatgatgtgtagatatcaatttacgtatcgcatggcgctcatggcgcgctgttggctgttcgagattcgatcgagtgagaagacgcggacaaacacatgcggcatagcgcgcaggctcgttttggcctgattgaagcctgaatgtctgaaatttggcctgaatttagaccgcctttaggcaaacgaccctgcccaggtgcgcgctagggattacataagcttgtacagaaatattgccggagttcaccgccatttaaattctgccagctcactatgactacaagtatcagagatgtgcagtcaacacagaaaagacagatctatgcaagggtatattacctagtctacagataatcttcacagtcagtctgtgaggtgccagatccatcttgaagaagaaaaaggagttcattcgactaaataactaagatggagaaagaaaaagaactaagttgcaaagtggaagcagccagttgatatcagctggccacttcataaacgttgcaaacaaccagccttctcgctcagtgatctaacaaacaatctagtttactatagaatgcgaacaagcgagcaagcaaatatgaagcatatgatatctatccttgatcgtgacatttgagatataaatgtaacacatgtcgaatttactatgcgtttagagctggaccacttatgtgaaatacgttagctaggtatgagaaataggcagataagagaaaagccgcacaactagtggctactagaattatgttgtatgtcaatgtctctttgagattaactagaagaacgaatataaaccaacggaaacttgcaataatcgtatctcaacataaaacatagattcatatagacatttaagagggaccaacaagggactctagtctactatagacagaaccatgaagtaattacattggagcgaggcattgcatcgcctgaaaagcaaatactgtagcagcttgctttccgaatcataaatgataagagccctataaaagaattttagcgtcgttctctgtaaaaatgaaataagaaatcccaatgaaactaaccttttgtcccaccatcgattggatcgttataactagagcttaggtgtgataaattgcccaagtcatcggggtgttgcccgtcgctttagtcggggtctgacaagacattgtacccttcgcaccaatttttcctttccacttgaacttggcgatagaagagttgatgatgtaaataatgtcctgattgccaacataggcaatattcaagacctggccgccttgaataccaaaagcacaggtgccatactgagccagctgatgctgcctgcccacggcagggactgtccaggtaccaccgccagcaatatttttgacaagtacctggcagtcagctacgaggggagaatcaccactgctttgattgatgaaggttgaggatccgcagtcgttaatggaagctcgtgcttccaagcggggttctttgggggccaatggagcagcttggacaaagaccaggagggtaacaaaagttatagaggtgggaatcttcatggtgaaggagaaaagtgttgcaaaataagttccaaaaggctgttaaggaagagaacgttttctgacatggaggaaattttcataggttatagcaggattctgaagcccttttatatccattaattctctgcccattaatacgttcatgtcgccgaggattttagtaaatgagttgacgtgagagttgcttccgatttggagaaagcgccaacgcgaagtatccagactaatggtatagtagccatttgacaagtatgctgtggagcactgctagcatcaccattgcaaatattttagaatattgattttaagttagcaagattgacctcattacgacctctttctatcactattagatgtccccgaagccccaaaggcagcaagagggtcagaactcaacaagaaccatgaggttattcgacgctttattgcgtgcacttcaatataattcaaattaaggatgtggtgggactgagtcagaggtggattgaagtattgagccacgaatatacctaggatgataaagatccctgcattatgaatgagcttatattccagcctatccataattagtgaaggggagctgtaattcctccgtgaggctgtccatactagactcccttatttgtccccctcatatgtctatatggataggtacacgcgtaattaagaagtcttctagtaaagacacttttcaaattgtaggatctatagtgagtggtattggaaccgggctaatcgctctcggttgatttaacggtcaagcggtgactgtacatgacagatatggagaccatactataacgcatatatggggccaactagatcacagtttgtgacttggacacacatcagatacatattagaggtatatcaaagtctcataccccatataggtccgctctctgtaggcagtactcccgaggcacatgactagtagccgtagttttctacaacatagtctaacaagagtagggatttggtatctgccaaaggccatggatctaggacggctgctccgtagaatgtgggcactctgtggctcctaaccttccctgatattaactcaattatgagtcctaagttgttctttgcacgtttccctaagaaggatgcggtcatgtcaatgtccgctaaccccacagtgtacgggatagctgtaaatctcaataaacgttcggaaaaaatccgagctcgagtattgtaagccaaactagtattcctggggagggataacatgtgatggtgtcagagcgtttgctaatgtaccagcgtgtactagtgtgcaactatgctctttcgtttcgttttcatcgcagcccttgctaagctaacgctaaatcgtgtctccgtcagtaggtctattctcaaaatattgaactaggatgagggtagttttgagaaatataacctgccctggaaaagcttcgagccgcgcgaaaacccacttatggcactattatagctcttcttttagtccccaaatatccaggttgcagcttggagagactcgtaatgaaagtggcggtggctattttggaaaaaaggaagcatagccaattaggaagaagagacatattttatatgcaacataccacctttatttgagtgtaattgcgaaaagcgggcggtatgcgacagaagaactatatttttaacgatagactccatagcgcggcctgcccctaaccaaatgtgtaagtccagaatcagtacagaatactgctaccaggcctcaatattgagctagttagcgtaggctactttgtacacatgggctgacgggcagatgtccaaatggccttagttatctgaggtagtttagtcatgcaaatagtacttctcacaataaaccatagtatattacggccaaatgtgcctgtcaggatgggcacaatagcgcatatgtagcgagaaatctgtcaatagccaaaataggcaaatcgggtagatccggagatcgcccttaaaggggattcttgaggcttaaatgcgtgaattagcaccgctgttcacaccgccctgtacgatgtattataaattttaattacaagttaaaaatatgaagctttccgtcccagaaggcttcaatgccgagaaataagggaattctaggcgttgtgtcacatttgacgcccattttcgaaggcattaatgttttcgacgatggcgttgttatggttaattcagatctttcaattttctgccgctccaaaataaggcagtcaggcatcaagcccccccattttggaccctgtggttcatctggaaagcgatgcccggcccagcccagaccgtagataccatctcttaccttagcttctgtatatacatatggcttggcccctttttttctcttttttcgccgtggctttccgattcaccggtgcccggaatttgtccatcaagatccactactccgtacttttattctgttcattgcggagcgaagcgtagcaattaaatcataacctcgtgtatgcatgtcacgtgtccagatggtttgtcctatgggctccaagatcagtagttttcatgcggtgaagaagtagctcggcgaactttggcagaataaccccaccggcagaataaatagactagagaatgaaccatcattgtcttccccagagcttctacagtcacactttgcgtagcattagaagttagaatcagtcgttttgctctgcagcgactatcgggcggccgtaggccgtccagatccctcgtattcagcactccgtagaacggattcatctacttttccagtggcgcagagatctgccttaatttccctaattgatcttagttcttagtaatcttagtaatcttagttcttaactagtaactattaaattattttggcattcctctcttttgattcatagcataccagctagatgctagatgctagatgctaggtagccaatagtgctccggggcctttactatatcaaattgaaagttaagaggcccattgtagataataaatcaatttgagtgtgtaaaaataacgaatcaagtaacacgctatttatgagctagttacaaaatctgggtggttagactgtttcttatactccgtgcgtacgggctccggagtaagtaggtttgtgttctaacttggacctttctgccttggcctaaagaggaatattcccaaaagaaaataataataataatgagaatataatttttctttcttttcaagggaaaaaaacacggtatcatggaaaatggtccagagttgttactaaagtagagaatcgaaaaaccgcagtttcaaggaccattatttgtacaccaacctataaacaatatgattctgatagtatgagcctacgtctatccccggttgtcctggctcagaaacgtagttcagaaatataagttgtgggaaatgtcgagaaaaggtaccatttgtatggcaataccatacaaaaggcaataccacaaaaggtacttattctactccgtacagatttgtaactaagctaattttttttgcattaaaccctgcggcccaactcggaaagaggtgtattgagaccgtatgtatcagttggtaggtgggcgcattgtatacattagggccaccccgtgcagtggagtctatcatttggccccgggctttgctgagatccctccaaggagatcttccaatcacactatgcttatcaacttctttctaggctggaagtatcttctgccagcgtgggacctggatcttgcttactttcattgtcgcctttcacaatgcttttgaaccgcctagttcccacttcgggactttcagcaatcagctcggtccaggtgctgcggacttttcttttctttctgttcttctatgttttactcatcatggccgcacgcagacagtcttcccgtgacccgtcctcaatatttttcgatccaacaaaggcctatgatcctgtctattcagctatcaggcttgagcaggcagcttctttcattgataaagcgaacaatgctacagagtcgcagatacaaagagttccacggcaacctaaattttgcctgggaattgccaccattgcgcgaaagggggccagctatttccaagctactgtaggcacattccttgagggcctgagtgaggaagaaagggcagacattcacttgattctattcatcgcgcacacggatccgtcacaacatcctgcgtatgcagagccgtggttgtacaaactagcggatgaagtgttgctttacaacgcctccgaaatcgacattgatcatatacgctctctagaaacaaatgaggccaaaatagcaggccgtgagaaggctctctttgactacacatatctgttaaacgcatgtgcaaacatcgacacgccgtacgtcattatgcttgaagatgatctcgttgctttagatggctggtatcatcgcactaaagctgctttgtcctctgcggaagaacagactcgagaaatgggagcggcgaattgtgagttttacagccattatggaactccttaaatttccttgctgacagttttcttacccagggctatacctgcgccttttttacaccgaagaatattttggttggaacggtgaagaatggcttacataccttttcttttccatccttgtcgtctgcttcgtggcctgcgtccccctggtcctccgacaattcaatcaccatgcccgttcctttctaccgaatatgacaataattatttggagtggtatattcacaccattgttgattgggctcttttttgccatgggccgagtgacgatgctccctcgagcaaacggcgtgcatcaaatgcccagatttggatgttgttcgcaagcctttgtcttcccccagtcacggataccggagcttgtcgggctatacacatccaagcatatcggatacgtcgacgtgctcaccgaggaatatgcaaatgcgagaaatgagattcgctgggcagtgacgccaagcattgtacagcatgttgggcggaagagctctaagggtgttgacaacgatatctcatcacacgtcaaaatcaagtcaaaggctgagttgacagttgtagagaagctttggaatttcgagtttgagatgaacgatgcagaagctttgcgcgcggaacatgatgctgtgaagcagcgagggggttcgtaatgctcgattttccttgtacatcaactttcagataaaagctgtttttatcctcttgatcattctgtatgtgtataatctaaatcaagagatagcgctggacaaaattcgaatcgtcatcaggtcgaatacttaatatcgatctacgatagattgctatcatatgcttcatgtttgttcgtttgcttgcttgctcattgtttgcattgtttactatattagattgtttgctagatatctaagcgagaagatttgatgtttgcaacgtttgcaaagtgattagctatatcaactggctgcttcccactttacaatttgcttcttctttctttctccatcttcattatttagttgaatgtgatctttcttgtttaagatctggtgcctcaaaatgagggccaactatctttttgtattcttcaccgggtgtaagaacatcggaggcaagcaaaggcgatgacgtccccccttccgaatactattagcgaatatcaacggaaagtcaaagggccagcaaactcactttctctgcatcatcgtaacctaaccaggctcgataaatcttttcagggaattgagacccaaacatgtaagacattttcatcagaatgtcattgtgctggttccagctccagatactatcccgcccagcgctgatcttgccaggcttgcctgaattagctctgagattgagctcaatcggatttgtttcgtgcgcatggtaaatgggctgaggaacctgaactgccttcaacccataataaagagcccaggatgtgggggacatttcagatgctaatcctagacctttttcgattttatccgcatgcatcagccggagtaatcgggccgagacgcgggacatagcgacaactgatgcccggcgcggagtacgtcccttttgacgaaagttatatacccggtcagcaaagggccagtcggtatgctgagggtcaaattgaggcagccaggtgatcacgtcggcttcctcacctacgccccagctccaaaaatcatcatcattcgagtctgagtttaagtccgagtgcaccggctcaggtgcttcatttccaacctcgataccttgtgcaggccgtgatccccagatactatcaagacctatcatgctctggtctacctgatcgatgaagttatcccagctcccgtggacagcaggtatataaaagtatgagttacgctcccacagattcttacgaggctgttgtcttgcaaaatctgctgcctgctcgagaaagttatagaaatgtccggtataacgcgaatccatttcaaactgccagaagaagtcgtactgtggattcacccgcgagaaaatctgcattggctgaaagtattgaagtatggccctagaaattattaacatttcgaaattcgcctgaagcagtatagaagagagctagaatgcgatcttactcgtgaacgtcgatcttcgggtaccagtctcttagtatctctgcgttgaaaaatactgacaaatcctggagctcccgcggaagcgactttttcagactgtccaagcctaccgtatcggctgggtgaggcaaatcaatatcttttgcatcaaccaaaaggacaacctcatattctgcaccggataagagtgatagctccattatcatcgaccggatataataaaaatcatcttccgtgtattccctgccgagccatgtacgcaggactaccgcggtgcgtgatttgagaatagcagaggcattgtttcgatctgtccgcatcttctctccgctccagcgatgttcatctgtttttttatcatgctccttgtggagagtccacatcttctcgccaattttcgaaggttgataacggttttcattgcgatgcaagcagtcttgttgcaaagtggcccagttcacatcctgccacttcacattgttgcctttgttgtcttcgtctgcttcgtctgtttcgtctgcatagccgtatggcgcataccgagaatatcggtcggtgcagagactccgatcaagcttccacgcctcgtacgatccaaacataggcatcggaaaacctagcatgctatcagtgctcgctgcactactgtatgccaccataggcttgtcctcattccatacctgactggttccaacgaaaccctttcatagctgtttccgcattcctacgatccaggactagaccatttggaccaacacactgctggtaagatcctttccacgtgtcgttccatgtagtgctgttatattcgggatatggatcgtaaggtatgggtagtggctcctgcgaagtttccaaaacaagctgaccgaggtcattcccatcaccagcagcgccagatcctaaataaaaggcatttcttctactacaaagagatgggtatgttagcgattgcacgaagactgccatatgaagcgaggcctggatgtctccagaagccctattagtctagatggtcaagtataccttgaagcatagactgttgggctgcgctgtgctgtagtagcttgctctcttggccaacgtaaaagtacgaaaattgtcaatgcaaagctaaacgcaatcgcaataagactgcgtttgagggaagtgcgccataaatgtcggcatcttagcacgaggtagtcaacgatgtgcattcttgagatagaccatatgatctaaacagtgttcgtatgcatggtgagaggaaaaggagaatgcacaaacacaaattatggccgtaccatgggcatatatcccattggcccccaatattgggagcctacagaattccgaagttcttccgggggtccgcagttcaccccgtggccccatggatggatgtgtccggagtacctgatacgtaagtggtaccacgtagtaatttacatgccagcgggtacctagacggcgccttacccgatatagtctaaaatagtgtccagacagtacccggttctcgccaagcaacccaatccctatatctctacgatcactcaaataggaaaaatctcactaattagtatggcctgtttcttcattacaatattctatcttctgtggtatactttaatcgaaattgattaaagctctctactggaaaaactagcctgtacaaaatatacaattcgagaattcggcccccatattacttaaacaggttagcttagtactaatcaacgtcgtaactaatccaacggtaaacgaactgcggtcgacccacccaaaacgcgccataaattaacgcttacttaattcaaccaattcgctcccaatcatctacaaagttagtagagaaagagggtgggatcttagtacctatccaggcctttaaatctcttcaattcgtggattagcccgcaccttcaacgtcgtacacgcctacgtggtattcactaacgcgtgacttcacatctgcaaactgctatacattgactgaaacgggagaggaattacttcaaaaatgggtagtactctctgtggatctacgtgcagccggccttccggcattcttcggtacgaagtcttctctaacactaacaattaccatccgtgggctaagatgcgaaagtctaaactttcgagcgggtcggcccgatccatccgtgttcattccaagcttgttgctatgtaacccatcccataagaatgaaaggtgtaaccggtaagaaccgtagcctaggggtttcatggagtcgtatatccatatgttaaacaggcgctgatgtcaaaaagcttggggtgcaagaagacatggatatgaatatatccagccccaattaaggcttttatgtacagtcttggataaaatgccagatgataaatgaaaaagaaaacataaaacataaatatcgtaaataaaagagggtatattgcttgcgatgtaccaaataagttttcgtaccaagttgggaatgctagatatcaaataagtcggatccccctatccaacactaggggcgtttcctgtgacggggcgtccctccgcatcatctcgtgcaccttcctctctagcattcgtattgatcccaggatctgtattgaaggcacggtcttgctcctgatcccgctggggcaagggctgcggaaactgcatttccataaaccgtcgtctgcgtctgccggctcgaacagcatgcaggaagttaaccccaacctgggcgaagaagatggccaggaaggcgccaatcacgaatccctgggagacatacgtttcgtctttttgcttctgttggccactgtcgctggtttgatcacgttcgttgggtatttgcgagctaagaccggggaacgaaaatttggagctaccaaacgagacggagacagagaaagagtacattgtcaatgacgtgaatacttgcggcgatatcgacgtgaaaaatcccgacaatggccgcaatgctaaagggatgatgcagaagatgaggagagggacggatagtcataagacagagtagagtgatgagcgagtagacctaatcggaaatatcagcatagcatctaatggggagaagagatgttgaacctaccagtctcgagcctcaagttgtctcgcccattttgctgagagtttcagtctctctcgaacacttgtggcggcgagtaagggatatttctcttcttcggagatgggcaaaatgcttgcgaaccaccatgggaagcgggctgcatctgtagggatgggtccatatgctagcatgacgcgcgggtgcagccaaggagccccagatctgcgctggttggtgatatactctcttgctgagaggagtagctgttgagttggcattgagcctaacggaggatcagcttcattcccttctgacagagcatttacaccgcctgttgaggtctccaacgactcaagtcgctcctcctctgcgagcgagatgtcatctacgcgctctgttttggcaacataatagccatccagcattcccgagtcgacgatcttgaaccgcgatacgcctgtagccaccacgagactgcgaccatctggaagcagctcatatcgctcgatcatcaatagcgttccgtattgcataaacggtgcgtcatgtaattgacctggctgtacccggccttgccggttgtgcatgaccatgccgaactttccatttccacttgcgagaacccgctgaatcataagtcgatatctgggctcgaagacatggagaaaagtgggcattgtcgggaaagatagcgtgcacacaaaaagtggcaagctcttcgcgtaatccgcgcctgtctcatcctgggcgctggtctcccgtctgactgagatctggtcggggaaaaagtattcgaccaaccgtgccacaggctggtttatgggctctgactgtagatcattcggaatgcctagctttcggcgacaaatgggacacagatctgtatggtttaagacccgcgcgacacattttcggcaaaaagtgtgaccacaaggcgtcgtcatcggatctaaaaggagtgcatagcaaacctgacagtctaactcggcgcagagactgtctcgcagcttttggaagtgaatgagatcctgaacttctgagcttccggctggcgttgtggaatctccatagatgacttcgcatgcatcagacgggaaccggccttccagtgccaggctatagattcccctcaaccacccatgtcgcttcaaatgcccacttccgttcttattccgcccgtcggttttccagcgcagtaacggtccgtcatcctcggacgagtccagaggcacgttgtctgcctccgaccccagtatttctccaaaaaggccaaccagcttcccaagcagcacatcagcgccacaatctgcaacacaatggtccccaccacacgtcttatttcctttccaaaggcatgtgaattcctgattcctcccctcagtcacggggtacgtaatacctgtccggggccgaagggcgggcaaacattcccgacagatcgaattcccgcatggtaggcggagcggagttcggaaagggcgggagcaatgttggcactggatcaattggatcacgatatgaggtagatctgccgtatcgctaggtgtatgttcttccgagcttgaaacatctgagcttgagtcctccgggctctccattacggtcgggataggttcagcgtcggtcatttgtgtcaggctcagggactcggctgcatcttccattacactgcagtccacgggtacaaatgcagtgaataagagggaaacgtagaaggataaatgatgaagctcggggggtgggggatccgctatctgcaggtgctcaggtgtgggtcaactttagataatcggatcagtgaccatcccgaggtccggtgtcgcagtacatcgtttatagtagtggttatacaaagaaataatattaattgcgtaacgaaacgaagcaaagcaagtataaatcaaaaggtcttacgtacgtgtcacgtggccaagtttctcccagggctgaaataatagcgttctaatgggccatcatgtgatcatcagtcgcttcgctctgcaaccatccatggatgtcattctcaatgatataggctgtaaatgcatccgacttattcttatactaattatgcggaataaaactgatgatgctgctaagcagtgagcactcaatcggcaaccaaataattatgcattttccaaacgcccaacaagtctccgcgcgatgaaaagaatccgacggcgtccatcccacaaaggatataatccaaccgtcagcaaagtgatccagagccaaatttcagcaaccacaacccaggcgatgaagaactaaatcttgtcagtgacattgtccacccttgagaaaatatagtgcacttactcctctgctgaatataaacctagcaccatacatcggaagtggccagagaacccagtggccgaagaaagtagcaacggcccaaaataacgcgtatcgtgaccatctcctttggcttgactcggaaagctggcccgtttcatttctctctttagtaacctcggtaacttcaccctcagaatggatagccaggtcgttattgctcatcgacttccagtcgaagtcttccggtgcaatcaatgtaatcaacacggagtatagtaacgggctaactgcagatgccactgtgccgtacatgcatggcaatgtctgtccagttgaagagactgtaacggcaccatagaaatgatgcgctgttccgagccagacagcgaggcccgtggctagaccgagatacgccgacgcaatgaccgcgatccggctttgctttctccaaagaatcgacagtatcaggggaaatatcccggggcaggtgatcactccttcgagttatgttagaaacatcgagtatatccttgatataagtacctgagcttaccaatcatgtaaagggtccagcccatgtcaatgccaacatagtggaacattgcagtgaggcctgccgcgacaaggccgaatataatcactcccacccgactccagaagattatctcttgattgtttgcattcttgttgaagtaggtgcggtagccatcaaaggccacaatcgaagagacagcaatgacctgtgctgacagtgtagacgtaacagccataaaagtcatcaggagagtagccactgcgccacctttgcccgctaccgcgatggctgcgtaaggcaaagctagtccattcgtgacttcagtactagtcatgggctcgaaatatcttagcttcaagatcaaatatcgagaatcgatggcctggacttactctcggatatgttgggaaggcctttgtgctctccaatcccaacgcaaccatccccataatagttccaagagcccaaggaatactgaaataagataaacccccaatcacgtatccaggaacgacaccttctggggacgcagcaaatgccttagtgaagtatccggtatccatctattcccaattagcaccaagccgtcagtaattcggggaggcacttacaatgacagctccgaagtttgacaccaaaagaatgattccaaaaaaaattccctgttgagatgtcatggtaaaaagcgagccttggtaatttccatccacgagatgatttggctgagctgcaatgacaagatcatacaaacccccaatcgacttgacctccacgctggtcaacgctttggtggtcaaataacaacacagaatcaaaataatgaaagtgtgaatataatcagttagaaacctgcaaaccctattagtgctgtggacatattttgaaaaataatctgacatacgttgctttgatacctccagtgagggtataaatgaccacaccaactggcagcaggaaagtggatgccatgatgtgcatcccagttctttcatggtaagccgattgaccacaagtgttttcgagcgcggttaccggacttacaaatatgtaatggcgactgaagcacctaaaatcatgttgatggtgttaaagagattattcaccacagccagaaaggtgaagcttaagtgagcgacagtgccttgaaattgttagttttcatgtttcactgacagacacgtaaagtcctcaccatatcgcatcttgatgatttccagaacagtgtgcgcgctgggcacacgctttttacagacagtgccgagatacgcaaaacagacgatcataggtgagcatccagcaccataccaaaatgggccacttacgccgtattgataggccaccaatacggcactcagcaatgcagtgctccaaagccaggactattgtaggttagcactgaatattgttaagcatttgttcacatacagatacaactgccgaggcaactaaacccgtgctgactctccgattggcaacaataaatctagttgggattaaaaaggagtcagatgagaagcttggggaaaaacatacgtttcagcattcgaattatcttcgcccactgtacttttcaatgccttggtgacaaatatcattccttcattattcttagcatagtcataagaagagttgtgtatttacgtcctacctgctgcaaatgacaacccaacaccaatcacgactccataccctacaccttgtgataacgggggagatatgtcggacatggctcttgaaaccacaagctgaaatggggtagaactgagcggaacaataatacctggcaattgaagccatcgtgagatttatatggggtctaggaaatgtcggctgagttcaccttaatctcaagctccaaacattgttccacttgaaaggcttttctatgcaagctaaccatttcaggtaattaaaaagagaaaactcgctgctctagagccaaatgtgagcaatatgacgtgctcggcgtgcttcatggcggagcttttcagcaccgcaaataaccagggaaaatgatgcaatccggcaatttggggtcaatttggggtcaatttgtcagtgaaatatggatagttaccagtgcctggataaacatagaaaggtcctctatatggtctagactattagctacaaaaccgagaagggggaggaatatgtacatctgaaaagacggccgaaaagaataccgcaaaagacaacgaggcatacggagtaggaggccgactattcttgtagtcaactattgagatttgaaatggagttatgtaattgagaaacgtgtgtacggagtagttaggggattccttggtcaatgtgctatggagcgttatggtgtcatagtatgcccaaattactatacaaaacatatggagcgagcaagagaagaagagagagaaactcgggatcgaggaattcatgtgaccaatcttgcaattaatcaattctcagctcccgagagagccgacttcaacctccgtaattggagttgttggcgcgtgcagaagcatgttctagatctattagcgcagctcattgtatggttattctcgggcagactgattgctccctatacaaaagcatttctaatcttaggccgactccatacgtttctctgaacataaagaagaatcaaacggaaacaaaaacacatgcatccagtatcagtcgttgggtgatggtgtcggtcctgaacgtttaatgatctttctgatcgaggctaccgtagtcaaaacgacggctgacctgtgcatgctgcttggtagggtaaggtgttgataccaactaacatcccatcaatcactgctctagccgacagcacgtatgcgacgatgaagcgcaaactgacgatttccttggtatttctccctcccacaacctgagccatatcaggaacgctatgacaccctcgatatctgagatgaaagttgcttaggattactaaaatgtaagcgttgagcgatccaccgaccgctcccagggtgtacatggcagttggaatggataaaacacccacggcgaacaaaatcttgatgaagatctctgaagtctttattcagcggacggtgtgatacttgattccatattctgtgtcgattaatacctcactctgttgaggtagcttccttgctcgggagtcggtgtcgggactcggtgctcgctctatatcggtcggtttgatatcggagttcctcggatgttgggtatctgtgatcgttgcctatttggaaatgtaactgaaacaatatgtaactagttacgattgattattctgttgattaaacggtaaaccacgctgtaactagttaactgtaataggaaggagcttgacagttaccccgggttacgaaggcccatagcgctcagggttcaaacccccctattctagagcggcagaagatttcaatacctgaattgccattacttatgtcttactaatcaaagcacgggatgttaagcccaaaggcttcatattttgaacttgtaattaataaatttacaatacactgtatagagcggtgtggagagcggtgccaagggttttgaagctgtaccgggtagattgccgtcggcgaagtcaagggaatacggagtagataagcatgcatgatcgatgcattatccatccactactcatgcattgacatatgcgggaaaaatgtggctacaggattcgcttaaagagaacaatcaagctgtaagtccgagacaggacagggcaatatgtaaatacggggtttgtccacaatggagaggagagcgttatcggtggccgacggccgttgaacccccaatatcgaaggtaggacggccgacggcgatggattcccccaacggggaccatttatatactcttggttagcaagaccctgtgaacaatttaaatagactctcgtctgaccaattcaactactctaaccgcattcctcattcctcaacacctgctccgtgttgttacacactgatatttatacacgaaaatatggcatcatcacaactttctcctttcaaggtgaaccagacacgactgcttgagtcgctacacacaagctgtcaacatggctctgcgcatccgtatggaaagtaaggtactcactctccggctttcgacctatgctgattgtgttgttatcagtgactccacggaaactggaatggctaggctcagtctaacggactcggataaagacgtaagggaatggtttattgagtctgcaaaagccattgggtgtcatacctacgtcgaccaaatgggcaatctctttgcgatccgtcccggaaagaataaagatgcccctcccatcatgatgggttcccatctagacacgcagcccactggaggacgatacgatggtatcctcggtgttgtcgccggcttagaagtactgaaagtactagaagagaactcgttcgagacagaaggaagcattggagttgttgactggactaagtatgtttcctccgataacatactgaacacttggctaataccgtacccaacagtgaagaaggagcacgtttcccggtgatggctatctcagctgctgtctgggccgaggcaattcctctcactacggcttggaatctgaaggaaatttccgctggtgataacacaacccgcaagaccatgaaagaggaactcaatagaataggttatgtgggagaaacgccagcttcattcaaggccaatccttttgctgcccacttcgagctccacattgagcaagggccaatattggaagacgaaggccgaaagatcggtgttgtgcaaggtcagaagctctcgactgattggcgattaaaattgaccattccaaggtgttcaagcgtttaaatggttcgatataactgtcagtggcagggatagccacgcaggcacgactcctctgtatgcgcgtaaagatgccatgctatgcgccgccaaaatgatcaccacagcgaactcgatcgcaaagaaggccaacggtctcgctacgacgggcatcatacactctgagccagggactgtcaacactgtagctcaaacaatcaattttagtctcgacctccgccatacatttgacgaagatctcgaaaatatgattgcagactgcatggctgaattcaagagaatagcaaccgatgatagcgagcgaggctgcaccgtcgaatggaaggaactggtcgatagtcccgctgttcattttgacaaggattgcatctccatggttgaagaaagcgccaaaacggttcttgcagatgtccctgatccaatttccgggggaaagcagtggcgggatatgatcagtggtgccggtcacgatagctgctacacaaatcggcggtgcccaacgagcatgatcttcacaccgactcggaatgggattagccacaaccccgtggagtattgttctcctgaagactggtaagttgtagccctggaaaaatctgcttatgatcatggctgactagtccagtgctcttggtgccaacgtcttgttaggcgctgttttaggatatgacaagctccgcgcgaaacgaggcgactttgcgtaagacaggaaagtgaacaaatgtctcaaatatctatcaagaatcaagcacacgatgaacgagacagaagctacataaataaatcaaagaccttgtgaaaaggagtaaagaatggttgacatatagtgtagcagcatgatgcttgaccaggcacgagcttttaaataatgttgcagctcgagttaaagggaaaatgtagcgaattcattggcaagagggctacacttattcaaggattcaaatagtctacttccttcgagttttagggcaaagtaagacgaggatgtgaaaaccggcttaagagttttccgcccccggttgtccaccaatcggcttcttcttatcaatcccctccctcacggtcaattctcgaactcacgatactatcgaggtaaaatgagcaaagataggagtgaaaccgctttcaatctcgataatagtaccccgacaattgaccgtgtcacgaacgcacgaaagtatcgctccaaagtacagaggccatgcgatttgtgtcggtctcgcaaagttcattgcaatatcccctacccatctcagccatgtacactctgcgagcgtaccaggcgatcttgcacatttgtggaaaagaccaaccgtaaacccagcaagaaaaaaaccaaggatttcggcttatcacaatcccctcgatctgacggtctctttggatctactgcaggtgacctagtcccatgtacgactgttgctggtgcagagacaacatctttcgttgtttccccatctcagagtgatggaagtcaatctcaacgacccctcggcacaggtagtgaactaagctccacaaaaaagctttgctaatagctcagtgcagatgatcattttttatccgacatctctggtatgcctaacgaatcactgctagacaatcccctgatcggaactggctggcctcgcgatgatggcgttgactggcccacgttcaacaatgaagatttccagggcatgcttgacaccttgggacgagaaaccatttcggaactactgcctattgatggtttcagtactgctgataacagtccatcaaggtcacattctagccagcctggaggctcggaagagttgaccatcgatcagaaacctgacttctcatctcaaatttttggattttcgggcgagtctgacccattcctcctgcgaaattacccgtacgacgattcaggcgaagtgaagttcttcaggcttatttatagaatggcatcaaatacggccgctagtcccgagtccgaccatacggttcctcctgatggccaccagaggagaagctcggctggagacgtgcctgtttattttctgcagaaccatagccaaaccgtatctcagtccttgcaggcggtcgaaaagtgcatgttcgaacaaggcaagcacgcaccgagaatccaactcgacagtctcgtgagtccagagatgggagtgggactagtgaagctgtatataccatgtgctctcaataccggattcccttgctaatgttcgaaggtattttcggtacatcttccatgccctcccggttctttctcgatccttcgtctttcgagacatcaaattcttcgtgaaaaacgcctcggtcgggcttcttgccgccatatacgcactttcactacaatttactgcatgggacgatgttctttgcgttgacaacggatataccaaaccgtcttcggaagacttatggcgcatcgcgtatgcctgtgtgcagaaggagatgcacttcccacggctatcaacaatccagacttctcttttactcctcaacttcgacccttttgatccagcttccgcagagaatccttcggcgtgggctttggctagctcaacgctagctattgctcagtccttgggattgaatatagaccctataggctgggatttaccaacctgggagattcgtcttcggcgacgtctgtggtggtgtgttcttgttgaacacagttggcgagccgtcactcatggacggcagtctatactttcctacgatagttggaatgtgactcctcttactttggccgactttgaggtcaacctgaatcctgaagctgggcttgaggtggatgatggttgtccggattactttatgcatcttagttcactcacgcttattgccaacgatttatgtcggaccttcttgtgagttcaaactcgttctgactttccccttcttagccactcttgtcgcgttccatagccgtctttatcaaagacatccctgagttcgcctatattcactaaccgcaccaccagctctctccgctctgtctgccaacaacggtctttggatagcttgatagatcaggctcgagtgtttcgtcaacaactacatcagtggatcagcgcactgccagagtcgctgcaaatgccagcaccagcacagacacactcagaaaccgaggaagaaccagtcgatactcgcggtagtttgcacatctcatacttcacagttcaaatactgcttttccgtgcccttttacggccaatactcgacgacaaaatagggctggatcaccttcagccctccgttgcagccatcctagacgcgtcgcgtggattgattcgcgctgtgactcgtttagtttacagcctcggtgcccgacatcaatcagccttctggccgacttatacgagatcatgcttttcttatccggggcaattcagtttcatgctgtgtttccaacatagagagccgcatatgatgcttaatgaccagaagctcttgggtatttggagacaaacattgcgtacccgcgctccgtcttggccgcttcttcgctttgcggctattcgtgttgatggcatcttttggaaaaacttggtcaatgtcgcggcagcttcccatgccgttgatacctcaatatgagcccttttaagtgaaggtcgctagtaaaaatcaccgatccttcaagatcttcgccaaaggctccttcggaataccatgcggtgattttattttacccctgaaatcggcacaatgacggtccatggcttgattgaggcctgggatcttcaccgacagtccaatcacataatcaagccaagaaaaagaacggtctttgaacctcaggcttggcattttaccttcagtctggatgcaagagaaattgtactgtccaaatgtgtctggattcaagtggcccaataagatgggggatcctttccttgggccgtcaaaatatgttcatgtctatctactaaacccaagcggtctcaacgtcccaagacccctcactcctactgcccgccatcatactctctgtgcgatgcaaaaactgcccaaagcctcgagaacctacaacccctccatcttcccggtcccaaactatatggccacgaatcacagtgtagcgcggccactgctttaccttgtgcccctcgaatggagtgtagtcgacattgtgatgaaggatgtcgttggtgacagtcatcgcaagactcccctcggggtaccagatcacaaagtcggcatcactaacctccgggataagtgcaccttttctcgggtacatgccatacaatttagctgggttggttgatgtcagctccacgtatttctgtatattgagtcgatcggccgaaagaaccaatggcattcgggtctcgacaccagagaatccgttcggaatcaggtgaaactgtccatcgggacgttccgcagtcacgcttgatcctttgccagacgtcgagtcgttgaagttaaacgggctgtgatcggatgagagaatggtaaatgttccgtcctcgagaccggcccaaatagcctcatggtcggatttgttgcgcagcggcggactgcaaacacattttgcaccctcgagcccaggccgatccaggttctcgctgctgaggaacagatattggggacaagtctcggcatagattggaagaccctttgcctgagcttgtcgaatgttatcgacggctcgaggattagatacatgtacgattaagatcggagtatcaataaattcagagagacagattgcacggtagcttgcctcgatctcagcgacggcagggtgagaagccgtatggtactttggtgcgtatagttggcgctcgtgcaatttcttggtcatccacgcaatcacagagtcgttctcggcatgcaccatagtcgtgaccttgtgtagacgggattgaaacaagacatccaagaattgctcgtcgttgaggcgcaaagcttcgtacgtcatgtatatcttgacggacgagatgcccaagtctcggaaggctggaaattccgcaagcgtctttgcgcatgggttggagatgatgagatggaacgagtaatcgctgtagcattgatcccgggcacgttcgtgagcgcaagctagggttgcgagaacactgtcttcatgcttccgttgaggtgcgaaggccacgatggtggttgtacctcccgcaatcgcggcgcgggtgcctaggaatttcagtcaattcaatgcaacatgttagtcgccagctctgaatactagggggctcaccggactcgaaattgtctgcagtcgaaccgagtccaaatagaggcggctcctggaggtgaacatgggcatcaatccctcccggcttgaaagaggtcagcacgtggccatgagttcattcatgatagaggtaaaaaaaaaaccaaccgtaacaagagctcccttggcgtcaatgatctttttggcctttgagccagccaatgatccttgggggacaattgagtgaatcttctcgtctttgacgccaatgtcacattgcacgacatcttcaaccgttgccaaagtacagttcagcacaatgaggtccagatcaggattcaattgttcggacatattgggagataaataaataaagaatccgtcttaaatgaaacttacatttcggaatatcaagctgttcagaggggggttccactctcgaaccgccgtcggcgtcgttatctaaaaggcggggcatccaggtctgcccgtcggcgaacaaggcactttagatttggctcaaatccatgcatggaaatattcggcacttttataatgtcgttgagctaattggaacacctttgtcattagcagattggctgtttattggggctagccctttagaatccccgtatgcaggtttatctttgttcttctctgaccttattcgctcagctatgtctattagaagattcaactactaagttgtgatggttgacctgggaaccttgggagtattgtatgattacatagaatacatagctaataatacacatgaacgagacaccacagacgttgaaagatcattcaaaactggccaccaacggtacgcactgaaaagtcggccgccaagtgctactttcgttgtcatattgattccttgaaaatcccaaatatagttgattcgagccgtgtggaaatggtgcgagatcttcctcggtgatccacggaggttgacactcattccgcctgaagatgccatagtcatgtatacgagcctcttcggggatgagtgctgcttgcgacctagttgcctcgactttgtgaggaagtgccactgtgttcacttgcctcagggcagggctatagccctcttccagtttcatcaatgtttccgacaaaacagccacgggagcgcatttgaaaaatccttgtatcggaggcgcttgtcgcagtagatccaaagcccttcgccgcaggcttgggtcacgacatctcaacacagtcatagcgagagggacacccacactcagctcaaaggtaaagggtggttgggcaccatttggccctactgaggtatcgagaatcaacctagactgctcgacgatagtaacgaagtctttaaagtggatatcgaaaacagtttcctgttgccttaagcatcctgtcacacaaatcaaagtagcagcatgatgcgtgagcaggataggctctgggtatatagaaacattggatactgagttttttctctcgcaagtattggtgtatgcccgatgccattgatcgagacgagctcgaagcgcttctttttttgcgaccatttctggactaacagcggaatccgcaccgactgctctgaggtgtaatttcgcctcgcgctcaaaaagagcaacttccgcagctatggcggatataatggttcttgcggaatcggcagatgcgaaaccagcgctcagatctgtttctacgaaggcgagaagttcagttggaaactgagtccctgaaatggtgagggaacttgtgcccagtcgcaggaataagggagcaatgctgcgttccaacagaacagccttactggtagatattcctccatggccgatttgggcacggaggtcaagtatcaaaatgatgccttgtcggtagagctccaaggcctgctccatatgtccttggattgtctccacacagatgaacagtgcgcagctgatgactgcaatgtacggatctgcgctgcctcgctggatctgtgaagaaacacccgagattgatcgcgtgtaccatgtcaatgcttcctgctgagcatgatcaagcaaatgtgccttgtttcggcgatctttcaaaaaatgaaagtccatgcactgctttggattttcgtacaatgcgctaattgcaatcattgcatcccacacagcgggctcactgcggcagatctgcggaacaacccccgtccagaaatctatattcattccacctgcgagatgttgggacacatgttggaagtaatattcaaatgcgcgacgttctcgtcgtcctggatttggagacgacagttcgaggctgggtgtggagggagcccagggagatacccctctgctctcatattcacacttccgtcctgtgctagagcagcgaaggcaattgggcttctcttcgccacatttgactcttcggattctggtcggcggtcagagcttaactccgaaaatggcggaggaaactcttacttgcaggttttgcatccagatcgagatttcacagcccctatacggtggctcatatctgaatcaggtgggagaaggcatagaagttcgggatcccacctacacgtaggtatggctggatgtggttcttagtccacactgtggaatactggacaggactacgggcaggacgttgaccgccctcataaagcggcagtccatcgggacggagtaaccacctcgacaggtctacagccctggtagacagatttgagcagtgctgcctccaggaagtatcgctgatactgtgtgggaaatatacgagctggatagcactggtttgctgaccaatgtcaaaattatactgatctacgccggtcaggaaatttgaggtcctatatttttaaaagtcatagattggacatgcgtaaatcgtcgctctgaatacaaaaagccaagcacccaatcagccgtcttgcagggtatatttgcaggacaggaaatttcaaatatcaaggcgtttattctgactgggaagtagtagatgagtccgattccgagtcggaatcttcatcaaggacgattcgtcgcatgacactcttgtcgaataagtccaaggcgaaacgtcgagctgggagtctataatgatgactttccagaatgcatagggtcttgcggaagagatgtgcttggtggaatcgctccggttgtttagattttaggctgtggttgagaattgtgagcaaatgtaagaagtcgcggaatgaaaactgagagccatacatgtgaagatcagaagcggctcttttggagagtaccgtgttgcccatatcgacgatcaactttaagatccgctgattgccgggatcggagtcggtggtggcttccttgagtttctccttgggagttcgcttcgatctataatcaaagccagggaaggaaatctagacggatgagtacaatgagacgaaagtgaagggacagaagatactcaccaagaataattttcggaaatcggtagggagacaaagtcccagtgaatctcccttttggtcaaccccggaatcccagcccaaaccccgcaggacttggagtccgtgtcgactgcgagatatcaagcccaaaacaaagaaagcagtgcctcgcatagtgagaactcctgcactggttgctatctgcacaatccgttggataatctcggcatccaagaatggtgcgccaagctccattgagccaatattgccgacagcccagaggcatcctttagctttgagaagcatttcgttgtcttcttcatccagcctgaaatcacgaatcgtccaagcaaattcattgaaatggcccgattgttctagtagcttacacccctcggcagttcgtgcaagttctcggtagaaatgcggtggtaccaacccaatatcctggaggtccaccagatcctcgggtacaaggcttccacggcgcggttgctcgacgtaagctcgggaaagagctgcctcaacaagaccgacatagctatcattgcggccaaggaaccagtcatccatctcttgggtgatgtaatcaagaccatccagatagtgatatcccacggaagtcgataggaatctgagaagtagcggtgcaccaatttcacctagatgatcaagagagggtcgacatttgaccacgaactccagataatcccgttgattgcatgcttcttccagaattttcacggcgacctggcagacagtgacctcgggatcatacaattgggtgacaagaagtttgaccacccattctgcattgtcaatcgccacttgaggcgaaagcgttacatccccaacagcatatttgcgtaggaatctggttgcaaatattcggatatccttggagccaattgttaacgccttggagagcatgacgcggagatgactttcgcggctgtaatccatgtttcctagcaaagtctgaatcagatcgttgcgatcttgcaactcaatgatgtggtaaaacatgttgagcatatgccatcgttccatcatgagcagcccgttgacatcgccgctcaatgcccctagcatcgcaaagtagcctccactgagagtattggccatctggtctttggagaaaagcggggatgcagacgtcagaccactcatgcggtccagttgggccagacattctgcaacctggcgaaggaatttgttctctgccagatacttggtgccctcgggggtcataacgagagtgcgcatgagaacacagccggttcggacatatcgttgatttgcttttgtgtttggaaccatggcaaagcgatatttgaaaggtcggtaaaacccaatgagacgtttcatgaacttggagcctttgattgcctcatccattctttttggattcgtaagaggaccctccactagacgatgaataatatcccatttccacttattgaagttgacggtgttcaggacatgagtctccagaatagcattgcggaactgggtctcgtccatggaaggactcatcttgtccttcccttgctcagcagggagcagagaaactgataaatctgtctccatgttgtatcgaccctgcccactgggatatccaccagaacgcgccaatgtccgattgatactatcgatttggaagatagttgcggttgaaaggtcgtgattctcagtttcaaagtcgactgcgggtgggattaggtgtggaagcacttgaagttgtgcgctgacggcttggggtaaagaatgctgggcaagcttgagaacctccgtcaataacagagttgctttacgtctgagcgagagatccgattcatcctcgatgacgtcggagagaacctgtattcggttaactcttgcgctaagccaggcctaggggtaaaaaaaatacatacctttgggagccctgcctcaaccaaaccggccaatatgagagtagagaaatgagcagtcagatcaaatctgttgctattggtgtcattgagagcgcggctggctcttgatgtttcaaggtcagagcgaagattcgagactctgccataagttgtgagtcttctgcccgcaaggaaagatgacgaccaggacgggggttttattcgcagggcgtcgaataatagctccatgatcaagtctcgggctataggatcattgtaatgaagcgaatcaaggagagaacgcaacggttgtgagtcatgtcttgcaagaataaccagtccgggccaagtcttcagcatcgcagaaatggctcgcgctgccgactttaatcgcccactgcgtaatgtgtcggataatgaatccgtgaaaggcgtaagaacagcttcaagttcagacccttgaagaaacttccgactacggggggtgtccacaacatgcagaaaacttgatatcagagactctgaggcgccgaacgtcccctctgcaagcgcgtcgtgcagggcagcaaatccaccggcagaagcaaccagttcagggtctttgaccaacatctcagccacggtcatgattgaaatgttccgaagacggtcttcatgatgttcagcaatagcaacgatggtccgcacaacggcgcgtgatatctctcggacaccgtctttgacatccaggaagcctctcacaaacttcagggcctgttccctctcaatgcttgccttggtttctttgaccagggacaatatcaccagctcgtcggtgtggagtgttcggatgatttgtagggatttgcgatcagcgatagcatagcgtgttagtcgataacccgcagctaccacctctttactgtcacttagaagcataacttgaacgcgtaggccaaaaacagaccacgcgaggtcatacttcaatgtgggatgccgtttgaataattcaaccaagctattggcgcgctcgacatagaaatcaggcgacatcccctctatctccaacgcctgcagcgtttctgagaggacataggttggtgactccacgtcaccatcaccatattcctccctatcaccatttaccgatccgacggcatccttgtttcgtgatggtgagcgcatgggactggctcggaaaaggctcgaaaggcgattgccgcgtggaggagtcgatgccggcgcctgcgcacgtaatatttcttcttccaactcatgctgcaattcgatcagcttgcggttcgatgagctcaattccgactccaccttgagacgctgctctttcgtttgctttggtggttttgctagcagtgcctccagcatattctcggttccgcttttgatcttcatttccttcgcgattctgtctcgaaggaaagcctgtcgctgttcggttgtgtgaaagtctgcctcgccgatcgatctgctcgcacgtctgttatattggtcgtccggccgaggcgtgacactgcgtgaagtggtgcttttgagctccgaactaaagctccctggtccaccgatggagggagctaacgagggcgccaatgatcctccccgtccgcccatgttgctgctccctccagactcggatcgcctgttcctcccgattcgtgagatactgtcctgccagctcccatcggcagagccgccatcctgactgagcgaggatcgtccatcacccagtgcacgatgatgagtcgacgcggagtatgctgagttgtgcccggaagccatagagctccatccagccgtgctggctcgctatcatctatcgcaagtgttctgagtatcggagggctgcattgaggtcgcttgttttagcgggagggtcgagcggagcggagcaagggcagtatggggaagtgtaatggaggggcgcggtcacaggttggttggtgatcaaagggaaatagtggccatttccacctgtcgaagggtgattgaattttaacttgagcacagcagtgatcgtcgaactgctcttgttgtcccactacgagatgctcggctcagccagatctggagaaacaaactgctgactaagggatcttatcgctccagccctggccaacattgcaacaccacgccatgctgaagagctgtgttcctactaaaggggttttcgtctcttgttgagaatggtctgatcattcaattgattttcatttgattatagtagaatctgaagatcgtatattctgataaactacttagtatcccgctctttcttcctaggcttgctcatactgatgaatacctacatgtaggtattttataccgttatcagttcattagttattgggggtagtcttctccaggatggtcttcatcatctcattgccaagagtggcagcttcagggaaacgcggcgcgaagtactccgcaatccgctcaaaccggtgacggtaggactcaaagtcaccgaaagaaacacagtcagaccatgcctgttgatcacatcaagttagcacgaactggagaatgggatattgcgaaagacatacccttgcggcaaacgtgaattccaaatcatccgagcggaaggtgttatcatcaattgcggtatccaatgcctcatccaggagatcctggttacggaacaggtattcggttacacccaaccagagacggaaaagctgcaggatgttaatataaccgcaatctggcaatatgctctcaatgactgtatacataccggcgtggaacagatcatatgatcgtaagggacaatgccgagtttcgaccagcagtcaacaatagccagcagactgagatggctgttcggcggcgccttcccgcgcggccgattagacagagagaaccgatccagcacctcgtccttcaacagcagatcttgtccttcggagccaggtctgaagactgacgcacctgcagcctttacccgaagcttgagctcctccctctgtcctccaatcatcagtttgtacaaatctgtgaccgactcggcgtactggcgaatctgctgttttgccgctgggttgaggatggcgagcccggcatagacgtgccacttattcgagtagatgcgcaaggtgatattgattttgacattctcgataccgcctacccaccgtccatgctcccaggggaactgattgttggcctgccaggcggttcccatgctcaggaaagcagcatgggtgacagcctgcgtatccgcggttatacggtcgtgcatctcaccggtgagatagacatgtttggagccgaacgaggaaaggatcgtctcaacgaatttgaggctttcgtctgaggctctgtgttggatgaagacctaggtcaccgcgttgttaatgcatgtccgagatagaatagaatccaggcttgaggttggtcataccagaggctgaccttgcggattcactttggggccgtgcagcgaatggcaagatacaatctctacatcggggggcaggtgtttctcgaatgcggcgagctctggagctttgcaggacgtttggccaccgacaatggcaccgaccttggttgcttaaatccgagtcagaaagtgattgcgatggaagcagactagcggctctggttcgacacatacataatccgtactgcgccacgaccttgtcgatggctccagcctctacactgtacagaatgtaatcgctaattcttgagacgagatgtccattggggaatatggtgactcctttctatatatacaatgagcttcttgagcttttgggtggcataatcccagaaggggacgtacttgagaagcgaactcttgttttaaagattcaaaattctcaggtctatcacacgcgtttatccttgatatcaaaatgcaacgttagttatgtcaggtctaaaggattagttgtgatgaggctcaatgtgaatctgtaaaatctttttcacttgttagtgaatgttttcaaacaacagcaaagtgaaggtgtatagaatgaggttgaacaggatcagacaaaaaaaattaaggtagcgtgggtgtaacatcaccgacagccagctggttagccatcaaccagaatggtatgacagcgccaaccaaaccgtactcgagccaaatgcactcatgtcatcatttgaggggatgggcaaagaaagacggatgggataggaagcttaccatttgaggcattgggactgcggcgccgaaaaaaaaaaaaagggccatttacctccatcctgcgtcgctcaggcgttgggcatacattttgcccatatcacccataccaatgatgccgatcgaggcatcttctttggtgcgacccatcgcgacaagtgcgcctaaaacgattgaggaataatatgtggcccttagagccggtgaccaagataaccactaaaggttgtttcggaccagttgaggttcaaacttgaaaactgctcgagtctgggaagatcaattgcaatgttagagagaattcagttgggcgaacgaaaaatttaaatactgaccggagccaggaccttcaccgcccaccgggccgactagagatccggatatagatgcatgacacctgaaccctgaggaatccggctcgcttgaaagtacgaaccaatcacaggtcgtaattttccctagggcacacacccacttttttcttcaacatccaagtgggatcagatccgacttttccttcctttctgtattccatccacactaaccaccaaaaacagtcgcaatggcccccaagaccaagacccccgctgccgctaaggagaacgtctccctcggccccctcgccggtgatggtaagttaggaacaaaattcgagttgaagaagttggggaaaaaaacatgagatctaacctatcttcataggcaagctcgttttcggcgttgcccgcatcttcgcctccttcaacgataccttcgttcacgttaccgatctctcgtgagtcgccctccacccgcaattgtcgtattagaaatcgagcgcaattgaaatgaacgtaacacgaaggatgatgttggctgaccaattttgattacagtggtcgcgaaaccatctgccgtgtcaccggtggtatgaaggtcaaggctgatcgtgacgagtcctccccctacgccgccatgttggctgctcaggacgtcgctgtccgctgcaaggagctcggaatcaacgccctccacatcaagatccgtgccactggtggtaacggcaccaagacccccggtcccggtgcccagtctgccctccgtgctcttgcccgctccggcatgcgcatcggtcgcattgaggacgttacccccaccccctccgactctactcgtcgcaagggtggtcgccgtggtcgccgtctgtgagcgtgtgcggcttggtctttccctttcccttgcaagtcattgcattgctggattggaggctatttgcgggcttctcctgcatctgtggatggaataaacgcgaggaacggccttgatcgcctggtcttcaatttttttcatacgctgaaaatcaactctcgggttttgctgttggattaggtagtgctaaatcaataacttgacctatatatcctggattatagcaagctcctaatgagctcagttgtaagatgatagtagttaccctctagatttacgaggcctggtgaaagttcccgtgggacatgtggatgttcagacattagtttattgttgttgtacagatgtgttatgtatcgtcctgctctttaggacttcgtttgcaccttcgtgtatcatcccgcgaagcatctacccattgacgtctgaatttgtgcagtctcaattgtaatctctacaccttataaaggactcttcttctgtccttgctcctcttctttttcttcctccatcaccttttctcttcctcttcctcttcctctatcccctctcttccattgtctatcgtctctctcctcttgtcaagctcctcctttccatcttaggatctttatttaaattataccccttattcacctattatgttcatgttagggtgttggcaaggggattcttttgacccttcgaacctttttgtgtgatatttggcattgtttttgccgggaagttcccaagtatacctcctcttctctcggtaatggacaaagccatttgacttggtcgcgtacttttagcgtgcctgtctgcattcttttttgagtgagaaatctgatcacagttaagcttattgtgcatcaaccaccatgccaaaggtgcacgaccaagtcaaacggccctgtctcctaccgagagaagaggaggtatacttgggaattttatgattaacacaatgccaaatgtcacggaaagaggatccttgttgattcttaccttttcttagaatttgttgcttgtattaatagctatgtggtaattctataatgttctaatttctagatgatataattgctttgcttcgctccgcaataaagtaaagacctcgggaagatccaaaaaagatcgcctcccgataacagatagaactgcgtttatccgacagctcaaagtacgcaatcggttccaacctctcctcacagctccaactttccctcaaagcttcaactttgtgcgcaatctccaacacaaaacgggtgcaatgtccacccaccaccccaccccaacaatcctcctcccaggccttcctccaaaaaccctcgtcggcatcgacctcataaccttcacatcaacccccaacttccacggaatccgtgacctttccccgggatggcacttcctctacaccggcgcaacagagaccctctctttgcgcagcggcgcatggttctacattggtgacatcacgactgcagggaaaggcagtaacgacacagcgctagtcgcgcaaggccacaaaaatcaaacccaaaacgcatcagagccagagatttacatctggaaatggagcgtgaatacagagtctttggtagcgctagatggtgagagcgcctcatctctccaagagagcatgcgctacaaagcgaatctgggttcggtctggcagagtggaggacttttcaaatatcgcagccggattgcgccctcaatgcttgtcaaacccgtgacagaatcagacactggcgaaaagaacgagcaagaccaacccgaacaccaaatcgaagctcgtatccagaccgaagatgattcgcaaacagaagagagcgggcggagggattggtctggactaaccgaccgcatctcaccgagccttttatcacgcgttatcggcaaaccggaggttgatgtggacgggcatccgcgatgggcgttgtcgtctgcttcaacggccaactgtgacgcggatcatatccctggcgtcgattcgccagctgaagggtcgcacgagccagaaccggaacgagaattcggcttcattcccgttgatttgaagcggacgtggagagaaggcgctgtcggacgcgaaaggacggaagctgcgaaggatcggtcttgggctctgggagacttgatcgatcggtatgctggggaggcttctggggggaatcagttgcttggagaactgcagtttacgttcctcatggtgctgactatgatgaactactcgtgtttgcagcagtggaaacggcttcttgagctgattcttacgtcccggggtgcaatcttggatagagaggcgtttatgagtgaagttcttcggatattgtcgttgcagctgcaacgatgcgacgatgttgatggtggactatttgagattgatggtgatgaaggcggggctttcttgcgagatctactcatgaagctgcgtcagtcagtcgatgacctcgttggtgacagtggatccgaggtcaagttagagcttgacaagcttgaagagtgggtgagggcagaatataactgggagctgcgtcgtgggactgtcgttcgccacggtatgctccaattggaggacggcgagcaggtcgaaatggactgggatgggaatgacgaggatgacgagactggagagtatgctccggtaattgttgatatgtgaaatgcgagaataggacatcgaattggttctatctctgcgcactcatgagatgtgtaaagtaattgacgatttccttttggtatctagcttgggtgcatttactggcgtcttgttacattttacaataaccaaatgacaagcattgaatgaaacaacggcatctatgaatgaggtctaaaatctctatatacagttcaaccctagcatcaaagataccaaccacgatgctaagcttcatagacctgcataagcggcgtcaatcaaacagcttgcgagtctaaatctaaaatcatctatgaacgctttatttatctattgtccctcgttctcgatggtgtaagcccattcatgttcttccttgccgaacataatggcctcgagccacgacttgatctgcgcggcatacccagcaggttcgccattggcgcccagggtgttgatatcagtgtcctcgttgtggatcaaggcaacaggggtaatgaagtactgaaggacgtgacgttagcatatcagctccaacaaaagaaaatagacaattcttcaacttacagcagtgccagaaacaaacgcctcaacaattcggccctccttggaagccttctcaatatcatcaatagtcaaagtgcgctccacagcctcaagcggcgcaagctttccgacaaagttctgcgacaaacgctcgcgcacgagctccagaacactgcgacgggtaataccgggcagaatgagctgattgtcaagaggagcagtaacaagctccagcttgccttcggtgttgtgccagacaatgaagaagttactggcaccagcctcggtgacctggcggtccggcccgaacaaccacaggatctgatcgtagcccagagcctgggccttgccgtgggcctgcaaagaaggaccgtagttcgcacccagcttggcatagccgaagccgccgggccaggcacggatggtatcaggggaagaggcgtagagtctaaggcccttgggggtctcggcttggggatccttcttcattttggtcatgtcgggccaggggacagcaataatgaagaggagggcttccttgggcacttggacgcccaggtgaggaccgtttccgatgactgttggacggatgtagaggtaagaaccggggttggggagccagcctagagacaattatcagtggatcgctctcatttgtattgtaggcaaggatagcctggagatatagtgatattggaacatacgagggccgtcgatctgcagtagcttggcgacaagcttcttcacctcatcgtacttgaatccgggcagcgaggaccgctgcgaactggtgttcaggcgtgcgccattgcaatcggggcggaacaggcgcagctttccgtcgtatccgcggtacgccttcatgccttcgaaacattcggtggcatagtgtaggaccgaggctgtgggtgggatgctgaggttctggtagggcttgacctcgggggtctcccatcccttggctgcggtccatttcacggtgaccatgtggtcggtgcagtgagagtggctcagctcctctggggagccgggcaaaggcaaatcgcggaggttggttgagcgagtgatattgaagttggaggcatccagctcagcgacattaggagcgacagaacccatggtgagatgattgtggtatgatcagggctcttttttggatgtggaggaggagaggttctatgagtcaccagacggtcaatggatgatctgaaaggaaaacaaaactggcggaaatgaagctaccttttgaaatatgtcttgcacaaaagaaacaaaagcggtttgccccggagaacccatggaatgcccctcccaaaccgttttcgatccaaaaaaaagttttcaacgccgaacggttcgcctctctctatttgccaccagaaacattctacattgcacactgttatatatacgctgtgtgttgaaggattgatctctctgaaactatgttgaataacttccaactcctggaacggtctttccctctactatgagcattctatgaggggtcaaatatttgctatcttcaggcccactttcggcatctccgaggctagccgcgttgatattcactcacaattgtagtcttcatgttcttatgacagtctcgttcatattaactagtccgatcgtactggtttatggaattacattgaaagtcttggctctgtagtctgcatgatccttgcatgctttataccctcaagctttgctcggggtaatatgtaagaagcatgttgccttctagaatacatcaatgtgtagtactccgtatatccaattgaattgatcaagcatggcaaaacaaggcctcgaacaccctcaaggaaatgatggtgtactttgtaccccagtctacaccaatcataatagctgaatgatatttccggctatcgtatgaccatcttgaaactcgatcaactaatgaactatcacaacacctaaatgctatctaattgggttaattgggtcaattgggttcatggagcttgataaagctgattttgggtgatatatatatcacacagcacattgaataccatcaacctttctatatattatatacaacacaacacaacacaacatgtatatgtatttgtatctagtccaaaacacaaataggttattgcgaccttatccccttcctcgtttattttctagctccatcttaacaatgtatcctgtacattaaactctattcaccatggccacaccttggcggttatattctgcatgtctccaagagaaaacaaggcaatccaggctttcattcacaattactctttaaattcctccctacaacaagtggtaaggtctcagagttccagcctcattccaacccggagaaactcctaccctagaggcccattccttgacattggttgggtcggagaaggtctccgtgccattcaacgaccaacgacaaaagcttgggtatgatacataatgcacctcggaagtgatatctgcagccacccaggtgccatcctgttatccacggtggtctgatggcaacgttgctagacgggacttttggatagtgttgcttcccctcgtattcccaagcgagtcagagccatggccaccatgactatcgattattggaatctggactagcacattcttagcttatcatgaagtcagaaggcagaggccatcaagatggagggtcgaaaggcttgaattgacggtcgtcttgagcctggaagatatcgacacggtaattgccgaggctaaggcgatgtcatatagaaccgaatcgagcctctataaacttgcaatcacatgccgggtgttgatgaatgtggaatgtgaaatttgagctgactcttttcaggacacggtcgagtgtatattgccctatcagaatgcaatttatagacactcgggctcagcgcagtggatagaaacatgttctgggtacttaacttagtcattcctctgagttattcagaaacctttcggtgtttagtcgatatgtgattcgacttgggatttgaaagatagatatttcgttatattgaagagcccacagacatggcattgatcacctgggcaagaacgacgggttagaaatcatctaaaacgtgtggaaacaactggcttacttctttattgtataatatataagttcctactgtcaataataacgaaggaagaagagagaagaagcagacatccatctgaaaatgctattgtaggaacaaacaagatggggattcgtagtatggatgtaaaatgagtaatgcataaaggaagaactatcacgcatgtgacattatttgaggacatagatatcctcgttctattctatggatacatctattgtaatcgttcttacccggaaggtcagatagctattgaccctatagcttttgaccctaccacgaataatcccatgacgactacattatgtctcggagaccgacatactatccttgacagagcgtaaaaacaagaataaatgacatgaatcatggctacatgaataatagttcgccaaggagacgggcggccgatcggtttgagaaaaaaaaccaaaacgtaagtgatgatgggggaatttggctcattatcgaggcgtacacaataaagaagaaatgcatctgtaagggtcctcgataagggcgagactactccgtactgtcgggcggttggtcggcagttatgaccgccacgaggtctatacaatatagaaggactaaggcgtgatcagacgctgctgccttactatatgacagatctcaagccaataatgcagactggatacggacatgtgcataagctgaagcatcgcttgctgatatctgacgattgaatacaggactaggctaaaatctcggggtttgtcacagaaatcaagacctaagaccgggctcagtaatatgacgtatatgattagctgcgaactattatttctggctgatcttagcctaaagagcatgagtggtgagagaaaaagaaaggaaaagagcgaacatggcttgcgtatgttatacggagtccggaagtagaatggcaggtgtcagaaaatcaatccacccgccgtgatatgcaagagccgagtttattgggactgcaaaagcaaagatgcgaaaaaaaaaaccttggcgacgaaaaaattggatatgtgaggatcaaattactccgtataccccgctgcatctgcaatgcattcacgggccgtggattctctgaaagtgaaaaaaagaaggggtctttaactactccgtaatagaaagaaagctaaatgatgtgtctatcactatttatatcggagcagattatagtaaggactccgtacgtcccaacaactattcagactcagccacagtaacatctacacaagaacagatataataaacctaaaaagcgggggcaaaggtggtgatcgctaacggtgaaaacatccgaccaaccaaagaaacatggttgctttttccgaaccactgatgagaagtaaaatgacctccagcctcactttgtatatagaaatagacaaatatacttcgtatcctcggcacatcgaggtaggggaagggaacagacccaatcgaagagagataagcacatgcaattccgattcaaaagtggtctggtccagaatattcaaatcggaactaccgagcatatcagccaaaactataggataaccgcgttttcttgtcccgcttcacgctacttctgcttttggcaggagtcttctcctatagaaaggcgcgggggctttcatcacacatgcaggtgatagagattcgtaactcacgttacattgcaggcaatttggaccttcgtgtactgtacttttggttgcaggggtccgaggaaaaggtttgttgggaatctcgatgcccaagaaacacgggaaagaagagggggatctcagccgcatagcagatctcactggctcgtgatcccggatctaaacagggctggaacttgtcgtgcggagcgaggcacatatatcgtgttatactttctaataacctcaagcaatacgatgtagagcatcggagccggcgttatctcttcaaatttcagtttatcaggcgcgtaagcggcagtacgcgacgctagcatgtgtagttcattttcatttttccttttttttggtacaaaagaaaataatttattattctccgcggagcccactgggatggggctagtttggaacggcccgagaatctacttgaacagctagcgccggactaatatactcactcctgttgggaaaagtattccatatagtatcagtgctccgtagtggggctccttgtatacacaatctacaacataatacgatgtagatgtatagagtacaatctagatattccaactcggaaaatttgcctagctaccctctctacgtggctgacaccatccccagcgcagcaatgcagtgttgccgtgagaatgccaactaggccagtttctcgatgaaagtgacagaatgccaagaaagaaatgtgttttgtctatgattccgattggctgttattttaaccgccaatgaaaaccgctggaagaagttatgtgggatgtatcgagtaaagtgtcgaccaaagtgatcaaaatggccaaggggggattgtcaagagcaagaaagcaaattatagggattggatcatgacaagatccaagtatcgagatagccaaattataattaaaacaacatcgaaggggataggatgttcaagatgttccccctgcaaatcccgattcgatccacagcgagaaaaaaaaaaagactttaagacgggacaaggttctaagattgtattaccggagaacggagtaggcgtagtacattcatgaatacgatgtacgatcttggtacatagtaagtccacttcatcacctaggaactccgcatcacagcgtgtagcagcacatctcgtggtcgtcccatcaaccggtgtgttggaattttcacctccttcgtgcgaaccctgcctgttggaacatttttccaggcattcgcccgggttgaaatcacaattccatcttggagcgaaggccgcaggtgtcagcctggctggttagtagaccgggtgatatccacaaatgcttacccggatacagttttcctaatgtcttcccaattagtccatgaagaaagtggctgaaagtggaggttatggagtccggtatatggaattgatatatgagctttgtagttagttgaagttagttatagttataggaaaacaaatccggcgtcagtgtcccaaacccggcagtatgacggggccggcatatctggataatccgatcccagtcttttgccaagtgagagaattagaaagacaatcaggggtagtagaatcatatgttcagaggaaacgccatagaacaagcttgacaatgagctccaacaaggcatgtattccgagagggcatcaaaatacgcacatcgcagagatcgcgtaccgacgccccagagtctcctttggtactccgtctccgtactgatacatccctggaggtggttttttttctctctcattttttcccgtccgtttttctgtctttcttttttcttttttctttgtcgttttttgattcgcccttgatttttgggggggatttagtatctcgtgctttgattcaggctggcccgaaggctttccatattcgatctgccgaatctcttgacagtatctcccaggcctcgactcgatggcccctccgccatctgcatatcatcggcttatattggcaagttgatgaatttgttcgctctccaatcacagctgaattcgagcttggactaccgggttaccccggttgtatgacgggcgtcgaacctccccttctgtttgctaaacgcccccctcgcttttgggatcttgtcacctgcaggtgaaatttggatcagaccgattccagaatagtttcttttagttgtgtcccaccttcacgcgtaaataacgcaccgcaccgtgacgcccgtatcattgcgacatgacacttaccccctttctgacatccagttggtgagacgttggagacgtcgatttcgatggcctataagaggaagcgctaggaccctggtttagcgctatatagagagttgtttgcctgcactttttgcaaaatcactcactatttgtcaacatttccgccttgctcaagattcaaccacggtatatttcggccataaatctcgaggcacagccttttggaaatcatactcccaatggctggtcttttgaagatgaagatgaagatgagccatcacgacaacaaaccatttccggcgttggctccaggtccgccgcgcctgttcgctccgcagacgtcgactgctgtcagtaggccaaagaagaattctacggcttgcctggcatgcaaagcagcaaagaggaaggcaagtcgttgcatcagtgaaccgtgaacccctgaattcccccctctttctccctctctctctgtgggttgtcacaaatcttggaacaaaacggctaattttctggttctgcctgatacagtgctcggggccagatgccccatgtaaagcttgtcggtccacaaacaccgaatgtcacttcgatccaagccgagacctcagacgaaaggttgccgtgaagcggacgatccaggagctcaccaaccacaaatatctcctagagtctttgctaagcacactcgggtcggctgaccaaccccagtttgacaaagtgatggatttgatccggaagaaggcttcgttccaggatatcgcccatgcggtcggaagccccgtcacgacattcggagacacccaagatttgtcgactgccagcagattgccaatcttagagtatggggggcatgccgtagaaacttcaggcaacgcggtgagacgaccatcagaccctggcaatataacaagctcaccagaagagcctccaagcatgaaacctccgcagtgggcaacagttagcccttatgctcgtatcacactagagagcctctgcgacatacctctcttcgaggtgtcggcaaagccgtggacaagtgtcacagatgatgattttctggtctcgcaactagtctcgctctactttacctgggaccacccatgctcgcagttccttgatcaacgtatcttcctcgaaagtatgaaattcgggaatcgaggatcagtcttctgcacgccccttctcgtcaatagtttattgtcaatcgccagcgtatggattccggaaatttaccacgctacgaaacaattcgctaacctcgataggcctattctgatagccctgatgttctttccacccccgagaacgtgttctcgcggggtcagaaatttttccaggaggcacaaagattgtgggaggttgaagacgatgaccacgacctgcctaatatccaggcgctcctcatgatgtgctgtgtgtatgtttccctggtcttagaaaataagtcgtattcatgagattgatttctttgcagatttaaatcccaaggacgaatcaagaaaagctggacgatgcttagtcaagcagctcagctggcacgggatataggactttttgatactccaacagtgtcgggaaatgacatgtcgtcagagatggaacggattcgcacaatcactgcgtggggtgtcttcaacgtgagcttgtaagcgctgcctaccatcgtaagaacgaataatgtccaactaattggcgcagacaaatgtcgattgagctgcagaagattgttcccttagcatatcccacgtgcggggtcaagttgtgtggcgatgaagactttggctggataccgtatcctcgctcaaacaaaatcacatttgacaaaaagccagcccatctccctcaagtgaggaaaggattagctgagatcaccatgatcttagtcgatattcagaagctcatttctgaaaaacgtcggggcaccagctttaatgagctgtggataaatgctaatgacccattcgaccgtttgactgattggctgagacgttggccgagtgtgtctgctatacaacgagatccgatcccacaggtccttctcttgcggtaagaatgactaccttcctgttccgtgtaccccagtgactgttgtatgctgatactgcgtgaagaatcaaatgtctccaggccatcatatacctgtttgaggttttcaatgacccccgtgagccacaatttgcccaacaggtccagttctatcaggctaggtccgccgagcaaacggcgcattgtcttcgcatccatcgccagtcgtatggcctcagacatatacccatccaggtagtcgatgccgtacagacaggccttcggatcttagtccatcaattggaaagaagtgacgaatcgaggcaggcgtttactgagctttgtcggtttggaatggctctgagccacaggtttaagcaaacagccgacgtgatccatgagatcaggaggaatgtgcagcatcgaagtatccgattaccacctgatgttgttgtattgttcgatcacccggaacggtggaggagtctcgagccctgaaagttagcatgacacctgtgcttgtgaatgtatgaatgcatctatttcgctaccccatgaatgatattgaaagaaatttcaccctactgcagattcgtgtgaagcaaagatggaatgtgaagtggatgtatcacgacggcaggaccggaacgaaggtgatggggaaaatctgcaacatcctagaaaactgtcacggcagagtaaacattgagactggcctactcactctttcataatggccagtactctgccttcctcgcaagcagatcggagacaaggacgtgcagtgtcaccgtctgtggtttgaggcaaaacaagggggtcaaacaacaacgttaactgaggggaaggggctgtcattcgcagaggcctgttagccgattacaggcggccagttgctgacctctgatccaccggaagtcttttccctgcacatttcacactcaaattactcaatgaaatcacacgcttgagaaatattgaatttctctagtgctggacttcccaaaattcctctagaaagtacaaaaatgggtacttacttgaactgacttggtaacgtgctaaagccaaccgtcttctgtctgctgagatacagttaggccctgttacgcccatcttttatatttggaattaccctacactttggtcagatggaaataggtagatacatctagatagtttaagtatttacaccgagtacaccaagtcagtcttaaagcaagcattcgaaagagagagcatatacacgatcacttttcaaaggttatagtacagagaaaagtcgcgtttagaactcaagtctctttatggccttttcctgcggtctacgtaaaaatattaagaaagggcggaaggtctttatacaacaaaacatctagaaagactacgatcgaaccaactggatcgtatcgttctcgacagaacgcggccgacttagtcttgtatatcaagatgtggaacagccagaaagagtatcaagtctgttgagaatgtccagagcccctttcaccatcaacttgtacacttcaggacgtttactcctttattctacctattaaatctctacttacctaggcacttggtatctaggttgttgcaaagctatagtgaactatatttgagatggaagtatacagtacatgtattcccagccaaaacaggtgacagtctcagtaccctgtacttatcctggccttagtgcatcaggcacaaaatctacacagctgagtcatcttgatgcttatgcccagataagataagcacaaacacccaagcgaaaaccctcaaaattcgacttctttggcaaatcgcacacgccgacgctattcttcccagccaaaacaggtgacagtctcagtaccctgtacttatcctggccttagtgcatcaggcacaaaatctacacagctgagtcatcttgatgcttatgcccagataagataagcacaaacacccaagcgaaaaccctcaaaattcgacttctttggcaaatcgcccacgccgacgctattccccccccccctccccacctcgccccttccgcttcctcactgccgtttcatctcggcatcttgctgcatttttaactcttttcttctccccctcccactcaacatgtcctacgacgaccgcgccaatgcgcgccccaacttgaacgatgagtccgataatgaggaggaggctatggtcaacgactaccgcgagcaggtcaacttcgacgatggaatgagcgagctggaccagaccatgtcccacggtggagggcaggctcaagaccttcaggcccaactggccgccgccgccactccgttggaataccaggctactcttgagaccaaattcgccagctacgacaactactgcagtctgttccattatatcctgaactccgatggccccgtggatttggaggttcctaatgtaggtattccgttttgccgaccgattgttgaacgccatgaatgaaaagtaaaagcttggcattcgtgaaatcaacaagtcgattcatccctccaaaagacaatacggataactaacaatgcttttctacaatcagtactactgggcttgggaagtcattgatgagttcatttaccaattcgagtccttctgccgttaccgcaaccgcgttgctcgcactggatccaacgaggaggagagccagctgctccgcgagaacccgaacacatggggctgctactcagtgctgaacgtgctttactctctcattcagcgctcgcagatcagcgaacaattgaacgccactaagcgcggagaggacccaatggctgtcgccggcgagtacggctcccgccccttgtacaagatgctcggctacttctcgatcatcggactgctgcgcgtgcactgcctgctcggcgacttcagtcttgccctgaagatcctcgacgatgtcgagatgaacaagaaggccatgttcgcccgcgtgatggccgcccacttcaccacctactactacgtgggcttctcctacatgatgatgcgccgctacggcgacgccatccgcatgttcagccacatcctcgtgtatgtgtcccggacaaagaacttccagaagggcggcaacaactacgaagccatcgccaagaagaacgaccagatgtacgccctgatcgctatctgtgtggctctccaccccacccgtctggatgacaccatccactcggccgtccgcgagaagtacggcgagcagttttaccgtatgcagaagggtggccccgaggccctgcccgtctttgaggagctcttccgctcttcctgccctaagttcatcaaccctactcctcccgacttcgacaaccccgcctccaacgtcgaccccgtcgaccaccacaccgccatcttcatggatgaggtcaagaacaccctgttcaaccccaccatccgctcttacctaaagctctacactaccatggacctcaagaaacttgcaggtttcctcgaggtgtcccccgagcagctccgctcgtggctgctcgttaacaagcagcgcagccgccagatccgctgggtcgacggtggccttctggatggcgagcctgccatcgccaacgatctcgactacgctcttgaggacgacctgatccatgtcagcgagaccaaggctggccgtcgtctggtcgactggtacctgcgtaacctcgctcgtgtctactaagcggggccagtgtctcattagtgtgccgagagttgaaaacaaaaaaaagcgaagagtggtgggagccttctgcttacaagaagaggaacggacatgacttgagatgaattttctttctttttctctgcctactttgttttttattttccatattatactcattgctctcccccttccccctcacgtttcttctgttgttttcctttttttttatttttcgagagtcccccgtccatggatcatggaagttcaaggcttcctggtccgttcaaaatcaacttcgagtttgattatcgcgatttccttggtgggcgtccgctgtttcatgtgtcaccctggtctgctgtcgctgcttctttgaaggcagatggttaacacagcatggagagtatttgtgtcaggtagaagaaaaacagttacttgatgaaagtattagatgaccgagaaatacttacatatttcaaatatttcatggtcactgtgcttaaacgattgctctgtgaatagtattttggatgtggatgagaaaaacaaaacctagaaacttcaaattcaatgaaaatatttcataattactaggcgcaggccgcatgataaacgtcttctatctacatgtacaagtacacccctctctgaactgaattataacaataatagctcgcctgtagcagccccaccagccagttgcggctgatacacctgctgctggttctgggtcacaacgtactgtgactgaggcgcacctccaccaccggtaccatcaaggtccagcgaagccatttgctgggagccgataccactgaagtaagcgtctgctgcatctgctgcttcgttcatgttgctagggcctgtagttgcggcgttgatgccagggccgacagggagagatggaggaggaccattgtacattggcgtgacggggtcgcctgtggtgataattgtggctagaccactattactggttgatgtggcagccatgtttgcggagggagggttgtattcgagcatattacctgtaccgtcatccacttcggaacgttgcaaggctgggctgggcataagacgccgaggccgggcagcgcggaagacttggtggataggcttaaggtagacggtggctagagtgccgacattcagacacagttcctcgagagtgcgtgggtctagcttttcgctctcggccgtgattgggggcttttgacccatgacaacctgcttggccattgctgggtctgtcgacagcaagcgccagtacatgtaaccgcggtcacgaagatcagggtcgtctgtttcttcggtgcaccatttcagcacttgtggtacgagctgctggcccttggtggggcgttggatgaaaagtttgacggtagcggtgagcagggccagctgcacttcgaccgtttcgtcgtggaatgtggccaagtagtcctgaaggaggccatccgagttatctatgcggtccgcatactggccaatgatccaaatgacagcggccttggcctcaggctcatccagatcgtcgatatttcggataacatgactgattatactttcgtactgattggggtatttgcggaagatgttgcgaatcactactgttgcctcttgaacgatgtatgggatcttggcatcgaccagctccaagagcgtttcgatacactgctttgcagcagattcaatcttgatggccagtttgccaatggcccggacggccttgcgcacaaagtgaacgtcaatttcagtggcatatctgcgaagtatatcagtacacgtttgatacggtcaatctgagaagttcctactctcggagctctgccaacacaacggagatgttctcttttgtggtcagcatgaacattaattccagcttggtgactttgacgtagattggatcgttgtaattgcagaaaaacactcggatgtcattccgtaagacctccggtctcttctgaagaattaagatagcattgcgcagagccagatattggacctcaggcggcttggagagcaatgtgacgagtggtggagataacttcttgcataacgaggtgatatgcttctcgcctggaatgtagttcatgagataaagaatgacacggcatgaggttagaaccacagcagaatttgaatgcgatagtcgcggggcgactcgctctgccaacagaagcgcctctgcggaatcctggggcacgtacgccattaatgcctcgaggatgtaagtttgaccccatctatttgaactgttaacacgatgtccctagatatggagccgaagatgcttactcggagcagtctgccaggattgaaaccaatttcgaggcactaacatagtcgatggtgagtgaaatcgattcactgcggccccagatgtccaccaatgaggctaagacgctggaaacaacagtcgggttctcatccttcaacatgcggttgagcctgtcgattagatctgagttctcaaccatctttttatcgtgctcatagagctttgcaacgcagaaagcagccgtcttgcggacgtatgggtcgttgtcttgcattaggcgtttgacaggttggaacgtcgcttcgacaaattcgcgaacatgcacatatgagatggttcgcagtgcaagcgcgcggacaagtgggttgttatctgccatatcctataaagcaagtcagattaatttgaatattctctcgtgacagcggggccatacatcaatcaatataggtagagccttcaatgcaacctctggtttcattctcgaataattgaccaggaacaagaagcacctagacaatgtattagcaagcgaccttcattccgtatggcaggccataagcatcattacatcttcttgatctctaaactcggcagattcatacaaccaattatatccggaaatagcgcaaccatgtcgttgttgctcatggtcatattggcgacaatcttcttaagtgcgatctttttggcggaatagttcttgtcttttttgccgccgctattgagctcttgccgtagctctgcaaccttcccctgtgtattgcgcacgcgtaagccatggaattgaggatagggagcaatacccatgaacatgagggcagatataatatggttatttggagtgatgtagggtaaagcaaatcgcctatgccaaatgcaagggaatcgagtaagatgcagaaggcctgagtacaaagctcaccaaagcgaggggaagtgaatacatggaagtagactgcggggaagggaggaatggccatgatacgatgtgggagaaatcgtgcaatcaaagaacaggttgggcgagctaacgtaccctagcgaataacttcgcatctcctccagaactcatggctgcggtatgggcgaatagcgattaagcactgcaaggcgcaatttgttggaatgcgaacttcggcaagctctcgtatctgacaaccgtgcgatcaatcacagtcgagattggctgggggatcttcaaggataagaaagtaagacgcgaaatcgagtccaaagggtccgggccgttcggggagcttcgagagaggaaaagggtgagatcgagggcgtgttcacttatggcgcatgcgggatactcggagacaaattaaatcagcgattggacattgtcctttcttaaacaatagatcggaaaagaattaggagaagtgggaaataaagagagagaggaagagggaaaggagaattgaaggcggcgtagccactaagggaacctccctactcgggcaactttcaacctcccccgtcattcgattctcccaagatcatctcccccccacaccacatctactatcttaattatgtcacaagctcgtctaccacctcctcctcctccgcaatgggtagtttcgttgaactccccgatgccgcgcccctcaaaggccgcatccagcatcccagacccgccaggcttctcgagcagtcggggaggcaaacaggtgagttctaccacaaatcatgacaaatggtcgtgaagatactaatgcggttttcagcgccagcaacaacagcaacaatctatcacgaagagacccgacgagaccgacgcgcttaagatgaagaaagcgtgggagatcgccatcgcgccatccaagcagatcccaatgaatgccattatgatgtacatgtccggcaacagtcttcagatattcagcattatgatggtcctcatgttgtttaagggtcccattcagggtctgataggtattaatgcggcgttcgccaagtacgaaaccccgtcgacacattcgcgtctgcttggagtgaaggtggtctacattttgatgcagttggcattactgtgcttgggtatctggaaggttaatgcgatgggactattgccgtaagtcttgctctccagatttgacgcttatttgctaacatgtgtccagtactacgagatcggattggttagcgtgggagtcggaacggcagcctttggagcgggctcattttgctttcaggtgatgcgataagcttggagtacggattaagtgttgaaagaggttaatggaaatgcatccatggaagataatgcgatttggaacaacagctcatcatgacagtgatcatgttggtctaatgccttgtattattgattaaaaagttccataatcatgcatttcttgggcgcaagtttctaaaggggtatcggtatgaaagatgtagtttcctgatggtcatcgggtcgcggaataacccttggtcacttctgacttcttgagcattcccatccacggttttcttggctgcctctttcagacgacgctcttcacgccaatccggccctttttgaatcacgattaatagcagcggtgtcgtggccatcatcaccaacgcgatgaatgtgaaacaccagccccggcccatggcagagagcataggatcgatgagtgccgtcgcgccagctcccagtaagcaacgcccgaaattattggctgcagtggccttggctgcttgtgttggatataggtctaccaggagtgtactgatggtattgaaagcccctgtcaatgtcaatcccatgaggaatagaatacacgttggcgcagcgagatgaattccaaagttcaaaaaccacccaaacacaaggacggatatgcttcctaacgtgagaagagggaatgcgagctgaagacgagctttttcaataggaaagtttcgcaagtcagtttcgcggttcttggttagcgggaagttcaattgctttgcaagacggcggtagttgaaatccaagaatttgccattgataacagaagcaatggtcgcaccaaggccaaacggaatatagcagagaccaatttggaggtcgtctagcccatagagctcattgaagatagcaggaatgcttgcgctcacgtcgtagaatccagcaaaaagaatagcattgcagaagaggatgagactggtatccttctggaatacaatggcaagcgtctggaagggattgggaaacttgagtttctgtttggatacaattgcggtagatatgacgccttcacgagcctttcgggagtccaggtagctgatcagggacatattccatttctgaggaggcaacgagccatcaccgacaataccacgagcagtttccgggaagaaaatcagaaatggaaccatgaaagccgctgcaaaaatggtcagaaaccagaagatcgcccgccagcccaaatattgagacaaaagacctccaattactggaccgacagagggacccatgagagatcctgcggtgacgaatcccatgtaggaaccccgttgtgatgcagtggctacatcggcgaccacccccgacgagagcgcgatggtggtgctgctccctgcactttgcaagcaccggagaacaaaaagagctgcataattgttttgtagggcaagtccaatatttgctgcgatatagatggtgaagcacacgatatatgctggtcgtcggccagctttatccgcaaagtcaccaatgaacatgggcgacagcccttggaagatctgcattcacgttagtcaagccaaaaaggagatggtcctgtacacataagaaggcgtaccatataactcgtcaaagtcaaattgatcaacgaatttgatacatgcaggtctttcgccaaggtattcaacgcgggaaagtagatctgagaagagacaggggagaagaacccagcccaagaggccataaagacaatatacctgcgctgactgactgtgaagaccgagtagtcgacatcagcaagatccccgcttctcgttcccgcatcttcaccagattccggttgcgaaacagatggttgttttatttccttctccatctagggcgtcaatttcaagaccaaatacgtgagtaagagggccttggggacgcagagaaacctgcaacccccgttttttctcgctagctcgtaagcggaaaggatgcatatcgccatttgcggagataacggcccaaaaagacgtgccgagaagccgaagatgctaaatatacggttgatcactactctttacaaactacagcatctgcctagatataattatctagtccagactgtgaggaagggttcaaaataacggtctgatgaacttgatttccccatagttgaatctaaatatatgcagtcaaaacaatacgatagtacagaacagaacaacagtcaacgcgctttgacggcttctttgcatgcctgcaagaagatctgactgaactgccacacttccgtgtaagtgttatacaagggtgcaggagcgacacgaacaacgtccggttttctttcgtcaataacaaccccgttctcctccaaacaatgcagaacatgatctaacaatccgggctggagacgtagactaagctgagcacctcgctcggctggatttgatggtgtgatgagggtgaatggtttatcttccgaggccgcatctataggatacctcatcagaagatgttctagatatcccgtgaggttgatggatttctgtcgaatttccttcattgttgcccgtttgaagatttcgagagatgcgatgaccgcgttgatgtctaaaacagagggattcgacagctggaatccagcggcaccaggctgtggcagaaattctgtagtcgttagtctcgctcatttataatcagaatcagatcacgcactgttctccatgttgaaacgcgttttaatatctccaccccaccagcccgagagtcgaggccggaatgtctcgtcgctttcgggctgtttctcatctacagaaccgtggcgttcatggacaaatagtcctgctataccacccggtccgctgttgagatacttgtaattgcaccaggccgcaaaatccacgttccaatcgtgaagttgcaaatccacattgccggcggcatgagcacagtcccagccgatcaagatgcctttagagtgggcgtgagccgtgatccgttcaatatcgaagtactgccctgtatagaactgaatagccgagaggaggacgagtgcggtgctggaagcgttatcatcgatcactttcatgatttgttccgtggtcaaggtaggctgatctagatccttgggttcgatcaaaaccatgccgtccttcggatcgaagttatgatggcggagctgagattcaaccgcatactgaattgcactcaggttagcaccaacaacaaaatcgacaattaaaatgaaaaatcgagaacatacatggtcactgggaaaagccttgccctccagtataattttatatttctctttggtcgggcgatagaagcttgccattagcaggtgcaaattggcagtcaaggtgcccataactgccacttcactttggaaggcaccgacaactgaggccataagcttggatgctgcagtgtcaacatcgacaaacggaggtagcaattgatcatcatgcggcacaaagtgcccggtcacgcctttcgttgcccaagttcgcaagtactgctcgatatatttctgggtgctacgaggttgaactcccagtgagttaccacaaaagtagatgcatttttcatcagacgcttcattgcctaatgagaagatgataaagtcaaatgttagaacggacgccgcctgggtacacaagagatcctgatacgcactttcatctactgccagggtcttccgcttgagatcattcttggacggaatgataaactcatctcggaagctccgaagcggatcttgagcatcaagagcttcggcatactccttcttgtaggctctgatatcatctgcatagggaagcggggagccggttttgatgtcccgaacatgctgctgggaacccattatgacagacctaggtccagatagttcctagaatgcgtgtgtatgtttcacaaagccaagagctcgagtcgatcggagcttcagcagagtcatacagtcttcccccaccaccatctgccgatcccttccatatatggagattattctgccttgatttaccgactctatcagaccaatggcgtcactgctaaactgactaacccgatgtaatcggaatggggatgatttgatatcaagtgttcttcatctctctggtttatcttcttggaatatcttattccttcatacatcagccatgtcacgccctttattctcatcgacagccgtccggcggttatcccaagcacagacgtgtcggctcttctcgacttcccgaccggctttgcgcctctccgcattccccggcggcgaagtcgttcctcgccggccaagaactgtcgcaagtagcgcgtctcctctcaaacgctcagttgctcaaccctcgaactcccgctatatccgtcagccacatgcgtgtttttcctcgtcgtccatccgtccggcgaccaaggtgacgcagaacccgagaaccggagatgatggacaatcgctcatgattggcatttcgccacgggccatggaggtgagttgacaatggatttaatttcttttctttctgtttgtctacttttgcttcgatcttctacctggcctgtgttgggacggacatgggaagctctccaaactgcatggaatcaagtgctggggctctgtctcgatgttggcttgctttcagccgacatgggaagaccctatgaccgcgccttgggtccttcagatgctctttcaagcacatgcgaccatagggtgtggaaaacagggcttcccgtccgctcagccgtacttaagccacacgccggtgagttagtagttgggtgggtgaccaccagcgaatcctcactgttgcatgttcttttttttttttttttgttcttagcttctccttcttttggggggttttctatttattttctatttttgtgaatcaccgagctaacccagcgcagcgtctccgcgagatcacagacccaaccacctccccctctgctattaaggaagagaatccataccaccatcttcgcatcacagttaccagtggtggatgccatggtttccaatatatgatgtccctagagggggcttccaaaattgacccggaagaggatactgtgtttgaagcagaagcagacgaagccacaacacagtcacctggcgaggccaagatcgttatggatgagccctcactcgagctgttgcacggcagcaccgtggactatactaccgaattgattgggagccagttcaagattgtggacaacccccgtgcaacaagtaactgcggttgcgggacaagtttcgatgtcagtgattgattgagcaatttgtcccttggagggataggagagatagtaactatttactatattttgccctttcttctcttgttttatgtacattatactgcattttgcattttgtatactggaaagatagataatcacattctataccccccttctcttgaatcggtcaagatattaacatcgatttacggtaaggagtcacgcaatgccttttagcaggtcaacaaaagccttcatagtattttgtacgggagagaaagcgaggttatccacacggagggagaagttgcgtggatatggatccagtttagtcaatgtataatagctggcttgcttgcctagcttgagtcggggacatggattccggcacttgaatggaaatgacaagaataagaaagagaatatacagcattctttatgaatcttctggcattgctttgcgcttattacctcatgaatcaggcgagaaaacagaacatcccaaacctcatctacttgcactaagcccattttgatttccctcattctgctcattgtagtgggaggcactgtatatcaggtaggcgtatgcaaatgcaatcatctcacaatgagagatatcattaatattatatcaaaaatcaccaaagaaaatccttctgacccttcaatgccttcgctaagacttccggataccattgccgcccggtaaacccaattctagcgtcctaggggatcttgtgttccagggacaatcttagtgctcctggagatggcattggtattcctggacatctggagacggctcggtgcccccttggactagccctggcatacaattcgtgaatacatccgagcgaagatctaaagtccctcggagattaccttttcgggaaagtacggaaccttccagattcggaaccacagccttgttctatcatacacagcgatcattgactcgggataaagaaggaaggagctcgactccatattagatatagaggcataatttaatacttgcacaatgcatatgtggctggtatatatatctcacgaccgttccaaggttcccattcgattattctagccagtttgtcggacaggagttaagcgcgacatctcctaggggcacttcaattcatcaccattacccgctatggagcgctcggaaattacaccgagcgaacagcagaggtcggggtcttcagacacgtctttcgatgaaacaagctcgcccttaccatcgtctgcgagctccttctcagatattacctacggcgcagacttgaaaccatcggaagtgttgaagtcacaggtcgtattcgtgcccgatctgttttcctctatcatggcagttgagccagtagtaaacccaaactaccacaaagtaaagccagaagcagatgcttggattgcagagtatgcttagccatgctccccgatggaatgatatcaaaactgacacgagactaagaataatccaggccgatgaaaaatgggcttccaggaacaccagggtagacctggcctacctagcctccatttgggcaccaacttgtgatcaagaggcactcaggatgatgattgactggaaccattgggtaggtctgaccgtatcttatatacagtatcagagcaaaatgttaactggtgacgaataggtctttctttttgatgatcgtatggtagttcctttactattcaaataccaacgtgctgaccctgtttatcaatacagagttcgatgaaggtcatctcagtcgagatccagaagcagcccaagaagagatcaaccgaactctggaaatcatggaggacacacagccccccgtgcgatgggatgataaccctattcgatttgtcttccagaccacatgggatcgtttgaagcaggtaagggaataatttaccctttttcgggtacagaatcaatcaaacgctgacctcaagaccaaagcggtgtggcagaggtatgcttggtctaaagtcatggaattggggctgttgagcagagcggctcaaaagtcagatctttttactaacattagggcagaccagcaacaacgatggaaatatatgcatcgacatttttttgatggattgttgaagcaggtcaaagtaatgcatagtcatcaggctcttgggcgcgatgtccaagagtacatggatatgcgcagagggacgatcggtgcatacccagctattgcccttactgagtgagtccctctccataccacttcatcctcccagcagactactagtgggcattgtattgactaggtccaggtacgccattggaatcaatcttccaccggaggttatgagcaattcttctcttgaggagtgtatgtgcatctcagcggatctggttctcctgtaggtgcaagatagctcgaatggaacaccagattcagatggctaatattttaccgagtcaatgatattctatcatacaaaaaagatctggtaggttggccaagcagcacatgtccaagactgtcgaagctgaaccattcttcaggcattgggagttgatcataatttgatctttcttctcagagctcagggtctttcgatgcaagaagcagtagatagaataggtgagatgttgaacaactgctaccgccgatggtacagtgcattgcagaagatggaaatatggggagagcacatcgacaaacaggtactcgctttcattgatgcctgtcggaatgtggccttgggtaacctgcactggaggtgagcggagacaaattcctcccaaatctggaaaatccagagcgaaattgctgacagggtcacgaatagtttcaaaacaggtcgctacctcggtgccgaaggagaccaagtgcatgaaaccagaatgcttcacttgcctaattaagtaccacgcagggaggctaccgaatcatgcctagatttaggaagccagagatgctcatatgatacggatgccccaaggactttttgggtacgctcgacaaattagaattctttattgctcctttgaatccattgaaatagaagctcaaaagatcagcctacccgacctggatatccaagttttctcttcagcggcgttcatcggaaccttaggcatagatcgcatacatacgcccctctggatttagtttgaactccccaacacagctttgaaaaggagtgatcttgactttgctagatactgggggtgactaccggagttactacttatgattatcgcagagccgaatagctccgtagatgggactccgaaaggtagaggccgaaaggtagaggccgaaagattttcaaattgaatactcggctcaagaatatctgggaattcgatctcactcgactcctacccaggatttactaagcttccacaattcttcttcctttgcctggtcaaatgcccaactgctatatccatattcgagcgcatctccacccggtggtgtcggatgaattgccaccgatgcaccttccaaatacaagccgcccctgccttccagctcactcgaaacagcaccatatatgctggttgcgcaggcctgtccgagactggacaagtatgccattgcgcgcttgtcttccaagacagacttcatttcctcctgagaatatttctggaggttggggctcataaaagccccagggtggacgctgaagccatgaaggccttgggcgccatacaagcgctcgatttgggtggtcatgtagatattggcggtcttactagatccgtaagcaagccagccgttgtagtttccttcccagttaacgttgtccagaggaatagggctgtagcgatgggctgccgaggaaacgctgaccacacgagaggcgaagttaggcgaggaacgtgcggtttccaaaagggtgtctttcagcagatagaagaggaggaagtgcgacaagtgattggttccaaactgaagctcaaagccatctttagtacggctttcgggggtattcatcacctttgttcaattagcgaggtcgcgcttttgtgtcggtattaatgaactcacagccgcattgttaatgatgacgttgagcttggagctctggttgagaaattcctcggcacaggcccgaacactggagaggtctgtctgatccatgaaaagaagcttcacacgcccggtatcgagcaatgagcccaaagcctcctttgccttttcgatgtttcgggctgtgccaaagatagtcgctccagtagatgccaagacacgtacagtctcaacaccgatcccagatgaaacgccggtgatcaggacaaccttgtctgcccactggccaacaagaccttcatcttcgataatttgacttccggttacacgcgagtcgcctgggccgtcgagaacctcccaccgattgtgctcggcataccgaccggagagttgaaaagggacttgggaaaccatcgacatgttagacgtgatgacaatcgtgaaacgtacggtcggagcataaataatccgaggctggtttactaacgaaaccgagatagcaagcaagacttcaccatcgtgtgcggcgaccgactgcttatttcaaacaaagcatggcggggttcaggcgatgtccaaccggattgaaatcggcataagttgtcgggccttgctaattagggaatagaccatctactggggggtacattggaggtggatacgccgtaggatcgtggttgctattactactgcacgctagcactggcgaagcaaacatctattcccgcgtatatctaatgttcggaattgcaccacaatgccttgggctacgatatccatagtaattgtaagtttctcgcaacttcccactccatctattgataccaattttatattgcttctcaatatggcgccaggcagccaatggcccccgctgtcaggggcttgagacaattctgcacctaacactaacaagcgcatactcgactccaagtatgatgtatgccagttactgaaccatatcagtaactctctcaaagtcctcaggccggtgttggaatacctgaaatctgttcagggactcatccccgatctcatcaagaacccggtgggctaggatagcagcaatcaacaattcggcctgatcaaccagcgagctccatgacctgcaatttcactcaggagccgtgcgtgaaacgattcgtcgcctatacactcccccggcacctgctgtaagcaatacagaaattcagacgattggataccattgattgtttacacatacggttactccgacataagtcatattttataagcacattatccactctattccgcttttgctcttatcttagctctgtggtgcacagattcggacccgctaggtgtagatttcatggtgcagggatcaattttgtgaatcacgtctttgagatcagaccaaaaggcctgagaacgtcgactctttccttttcgagacaatttggacaggtatgacaaaaacaaccttgtctagcgtcgtggtccggcgtcgggttaggctttgagcggcaggcggtagaattaagcataatggagtccgctgatctggtgcgatcgagacttcaaattgaatttgaaagcctcttccggtgggccgaaagtgatcctgcgctttgtgttgtctcaatgatgccacgccgtctcgtgtagactgcatagtgattaattaatggcaaccaatgcgagctctttggtgagacatgagaatttcatgagaatttatcttttctgttcccttgtgagccacagtcggggcgccgccgaaccttgggtggattggagacaacggtctgtgtatggcacacattttacccccaccagacgggatcgtccaggattgccgtacggctgaactatgactttcaaggctaatcattgtcatgtgggtcaggactcgagaagttatttgatccggtaagccggtccgtatactccgaaacacccctcagtaagtgcagtatgggcttgctagatcctgtaaagcatttatcttctaggctattagatggctgatatctaccatcctaagcaaccttatgaagttcttatgcttctgtcgagatagcaccttagtgagtctatcggtaaccatactcgcttagcaacccattttaccttaatgcgtccctctctaacctcttatagtagcgataaatatccatatatcgaagcttcgttttatatgctataccctcactttttaataggtttatagtcctctcgtcattatatataactaatagtaaaggtatatgaggggataaagctatggtattaagtgttacgatctggcggctaggagccgtcagtgtgacgatctgggaagggtcgtacttaccagacaggcaggaacgaccacgccctcgccctcgcaccttcccagaacaaacgagattaagcgagacaattgcgagttttgcatcgaatacaaactcaaaagctagtagaagatggttgctacttttctattctataacctttatattcaaaagccgtatggtagtagctagtagctaaggtctctatgaagctctatagtttagagctaatgatatttctacttaagggggacctatccgaagggaaagtctttcaaagactttatgctcttcctggtagttttcgatgtggcaaccataggtgaggatacgtggcggatgacgaccgcgtgcttctccgtagaacaggatctcattccaggaagggatacaacgagcaatcaggcgctctaggtgagcatatagatttcggaggctgtgtgggtgtagattattgacataataggtgatgcgaacatcgggtgtgtcatgaggcgaggaagtaaattgtacctcacatggcagccactgaaatcgattggaccaacaactcttctgttcatccctgtgacgcctatcatggcgccggggcctattatggcgcctacgcgttcgttcaaggggatggaccggcagctctttcgcagtctgtccggtcaaatgccaggggtcatcaagagatacctgtccgccttcgaccaacaccggggaccggtcatagacaagggggaactcagatggatctactagaggagagtcgtgactggcttgcgttcctaatcgggctacctctgtcttaatatccttttgcggcagtggcacattagcctggcatacagcagaagagctgtcaaatactagcaaacggccagtttcttgccaggtctgcgccttgtcccgtagctctgcgatgcaccaatcccaggctggtgcactgataagagactcttcacttgctactgcctcttggtgccattgcgcgagccgaggttcatccggatccagcagcgcttggtcccacccgggctgttccgttatatgttgcataagtcggatcatggccatctcgcgctttgtcaaccggggcgaatggcgatattcaattagcgcatgggcaaagcgggtcgcggtggggagctcatagtccaagggaatggagccaaatccagggacctggagtggaccatcggtgttgttgagacttgacattattgagctttctgttctgttgaaggcagggctctcataactatataaagagagaagaaggcaagagaggcaaacaagtctagccctgacatttcctaatcggattttatcgccgtgcggggtgacatatgagtggactagacgacctcgggaataatatacagatactaatcgcgatagagatattacacagtaaatcagaaagccacatttcaaatctaagctacccaatcgctctgtagctttcaaggctcctcaatgaatcggactgcgtgcggatactctgtatggtcatcatatggttccggattcttgttgggcaaaatccgcaaatgattcctactgatcctgctctgttgctccatacttcaaagtagtttgcaccgctggttgttgccagtcgatgtcttggaatgagaccaactcatcctccaacacaacagttcgctccgcaatcaccgcaccgacgtaatatgcacgaagtgaatttttcttgtcttgagattgtcctgcctgcgctctgcgtgaccatacactagcgctgtcttggcttggagcaagaagatcccccgctggaatagttaggcggttgtcgcgcgttgatcaggatgttggtcgcccaggagcaaactgtgccgttgctcgtcatctgagaccaaattttcgtagattatatttattatacccccgtccagtcgttgcatcggccagctcttgtaaatcttcaggcccagtggtcgatcctagctcgttgtccttgagtaggaatcggaatcataatcggtctcgatgctataaatgaactccaagaaagtgcagacaggaccagacttcaggatgcactcagtgcatagtgtgtgaagatctccattgatagagacgttgatagagacgttggccaagtaaccctaataaaagtaaatcacttcgtagttatacgtgagctaggagcctaccacaacaatgcgggaaaggatcggaaaggatccaatgaaacgtaagcgaggctcttattttggcagagttgagagagatatatgtatgttttcgagaatcaatgacgatctacaatgagcaagacgtaaagagtaataaaagtgtggattcagtattggatactggacttcatggcctaatatataacaagtgtaaggagggataatatcggccgcaatcacagccaaattatcccgtatcgaaaaacagaagtctcgcttctaaggttcaatggtctttgttagtacgttacagcaaggcttggttagtacttcggcgacaatctgatataaaccgttgatattggtggtgatactagattgttaactagatattagttttgtcattttccctttatctagatataggattcaaagattacctgccctcctatgggtgactagccaaatgcctaccgacgattgcctcctataagcctgagtacgatcggtatttcagaggccaattttcaaaccgcaagccgtgattgtcgaccaagccacactatccactgcccgtaagctgacggtcttcaagcgaaagaagcatgtggaggaaatcgttctaacaacgacaaagaaattttgcgaaagtgcgaattaaagcgccaacgcaccgacggacacattgagcctcgatcatggggacaatctaatgaagcagagtccaaaagagaaatacagtcggaagaagcgaggatataaagccctactggaatcctaaaaaagatcaactctcctcagtgtgccgatcccgtcactcgaaacgagatgcagtataccgccgtggttcgtgtcggtaagtgacgagctccatagctccctagatatctagaaggatatgaatggcgagatatacttgcaggacactaagaaggctgaaatattggatatcgatgacttgtgtatcaaaacttctggtaacgctaaaatgagaacaacaaatgcctaatcccacgcagagatgaagaccgtcttcattaatccttctccatcttcgaaagtccaccacggctacgccgaatgcgttcatcgagagtatcctcctgcacccgtttattgacatcagacatgaacctgccccggtctgaacgctgccgatcatcagcctcccgctgctcttcttccttggcagagatctccgcgagtcgccggcgtcgctctgattcgatttctgtggcattgtattgcatctctgccaatttacgacggcgctcttcttcaagttccttgggatcgggcttgttcgttggggtacgggtcgagggtggccccatggcgcccctggcagagtcgcgccgattgttgtattcgcgtcgggggaagtcacgactccgatcttcgtcggcggcggggcgttctttgcgatcgctagaaggccgaggagatcgagagttccgggatggtgagcggtctcgtccacctctgtcttcgcgatcttggtgtcggctggagtgggagtctctcttgtcatggtagtcgcgacggtctcggccccggtctctatcgtcccggcgagaacggttctcgtcgctcctgcgatcacggttgtctgggcggtattcgtcgtcgcggcgttcacggtcacggtcacttcggtgtctgcgcgaagaccgatctggcgaagcgggtgatctagatcggtgtcgtcgaggtgaagaccgtcggtggtggcgctcacggcgctcgtcaccggcatcatcactatagcgcctgcgctttgagtcgtgggtacgatggcgacgatcacgatcctttccccgatcgcgatctccgcgttccttctctctttccttgcgcctgagagtctctttcaccatcgcctcataggccgcttgttctctcttcttcacttcgagtagcgggtccgccataaccttcgacatggtgtcgcgcgccgagacaatagatggaccggccgcggaaccattacccaccacctccgaacccttctccagcttcttagtgtccggatctttcttcaggaggactccatcgatgcggcgctttcccagcagatatccctccatctcctccgagtagtgcccggtctcgcccgagggtgcttggtacatccagtcgactcgactgtgttgctttgcttttccggaggcttcttggaggcgttgaatctcctccatctggcgctcctcctctctttcacgctgtagttgcgcaatctttttgcgctcgtcgagagcgcgcttctcttccagccatacacgctcctggttcttgatcaagcctggatgccatgacctggttggacggttagcgttatgcttctctcttgaagtaggtattgaagccggaacaaggtacttacttcttaaggttcaaatctccacccatgatgcctggaaataggaggaatagaatgtaaaggagcttggtatgagcaagttgttgtccgagggtccacgggtaaatctaaagccttaatcgccaccaatcacgtgatctagaaatacgatacactctgatatggagtgtgttaactatgtgatacattgaatgtgtcgaataaaacgggaataataaaatgaatatcttctattttcctctttcatagtcgggatatcagtatggcctcaaataactaccaatggggcagaattaaccataaagcagaaacattagagatgtagtagaagaagttgagaataaaaacgcgaaaatagcaaatgacgggggttggttctaaatacaagatgaagaaccgaaagaaaacgcatcatatcatatcgtcatcgccatcgccatagaactccaagagcaaagccggattaccagaaactacaccatccaatccaatgttgacagatattctcaacattggttgcctgcgcaatgagcttgtccacctggtcgctgacacttagctcttcgctatttcggaagtctcgtccagtgagcttctccttgactcgggcgagaacctggagagcacgggcattctgtgcctcgcgggcttcttgtggaacgccttcgggagcatcgagaataccaccttcaagtatggatgggcggcggcgacgggagaattcgcccggcggctgcgcaccgggttcgaaattgacaccgtccatgatagactggcgacgatccgcggtgagagaaactcggtctggggatgagtcttgtgcacccagacgccagttaattagagggtcgtggatgaactagaagagttaaagttagtgtggttcgagaacatccagaaatcaggtacttacagcctccaaaaccgccatcaaggaatctttatgctctcgtagaacacgcatgacagcctcacaagtgatgcggtagctaccctcaatgttgctgacttccatggcgaatgtcaacatgcgagtaagtcggaacggaactcgctccgggtacttctctcggtgcatcgcgatctcgaaacaatcaccgaagtcgatgtgaaccacacggccattaccacgatccagcaacaagttcgatggatgtctgtctcccagaccgaggatgtagcccaccatagacataacaccaagcgatcgagtgtaattcgtacggcgctcgagccatgcctcggagctcttgctcttgagccatagcacacggtacagatctttgccggtcgtattgtccatagcgtaaccgaagacttcaaccttctgcataagggtaaggctatcgtagtcgggtgccatttgtagcatgatccggtgctcaatattgagcagaatccgacggctttcacggtattccttgatcaaggcatggaatgtatcgctgttggatacccatcccagaagaccagagctctgagacaatggaatagcagggaagcgctgaaccgacaggtgtcgcttgaaactctcgctatcgttgtccagcaaggtattgcacaaaccgaaaagttgcatgactcgctcatcttgtcggatatcttcatgacccttgacaaggtacatgtaagagctaccgttgctgcccttgagcgtcatacgacgcggtcgtttctttgtctgcaagacatgcaagatggggtcaaagctcataattcgaataactggcttaccactctggtatgttcctggaacggcaagatcaaggtctgagcaatccttgagtcgaggagacacgtatttcagatccagagttgatagctgcggcagttgtcggctgatcttgcggaatacggtgtaatacaggtcccaagcttggttgagatcgccgatttcatctgattcgcgaaacatcatgcagtagtgcttggcttcagccaaatcacgaccgaaagcttgcgcaaatgacacctcacgaagggtctcagcgcccttgtctagcatatcatggaagggggcaagtgttgcgaacatgccgtcaacatcgttatcaccgaaatagagacgggaggcttcttccagaccttcatgccaaagctcatgccacagcaccgcaacccggataagctcatgactgacaaggtctgcttgctcgaccagcttggcgctatgttggcgcatactttccatgatgttgctagcagattgagagcgtcgggtcacgttcgatttcattgctaccgtcagtggatacacaagggcttgaggatgcgctttgccaacctcggcaagcaacctgtgaactgcaccgcggactctgatattgggctgattgattcgagcgataagttgaggagtgacagcaagccaagtgtcaatattgacagccgtaaatccttccgtaacgacggtattcacctcatgatctccgccatgattaaaccacagagtgagtaaccttaaagtgtcttgcaacgaagacgtcaaggacaaagcgatggagcgaatgaatccgcgaattgcaggaatcacatgttctgtaacgatatgagcaggaacagccccaggcataccctcacggctagcctggtttgaaatcgttgtaacaacttcgaagtttgcaagtgcccaggagtgccacgccttgtatgaatcgcggttgtattgggtcgccgctgagtaggcattgagaacctctcgaacgtgttctggcctccagtcacccctctgtagggtggtctgccactctccctgcctcagataactcttggagagaagttttctaaatttgttggcatcaccaatccgttcgttcaggctgatggcgtctggatggttctgatcgacgaccccgttggctccattcgcagcatttgataccatgagtgtgttgtatcgagaaaaatcatcggtcaggccagaggtaaattctttcatcatttcaagagattctagttggtgaccgtttgcccaactgaatttcagcctggcgtatgtgacttcgggtggtgcgatagtgcgcgttccattggcatcagacaccactgtctctagagatgcaagggaccgttccgcaagacccatgcggttggacttgcgacaaagattggcgaacttgatggacatatcaagattctcacgtggagcagtgacaagagctctgaccttgagcatacgctgccacacttccacgttttgctgacatccgagcaatctttgattccaagttttacgcatggcatcttgcttttcggggtcgccgacgttttgcttgtatgtgatgatctcttccagctcagcgagcatctggacccggacaacaacgttgtacgcacggttgtatgactctccgagaagagctgacaattcagtatcgagaccattccgagccttctcaatgtacatgttggcttcttcgaattgattgcgatggattgccagaatggcaccgaagaatgagcggtccggggactgctctttcatgacaccaaggtaagagtccatcaactcccactggcctcgaccccaagcagcggcagcagcgagaggtgcaatagctcgtcgatgttccagtgatgcttggttccacttttcttgagcgagatccgagagaactttccactcgccaagagcgtgcaaacaccgcattttacccattgtgataccaaatgagtccgggtccgtcttctcgcgtcgcttgtaagcagcaagggcttcgtcccaccgttgaagcttctcgaaccacgtttccttgagctccacatcacgatacgcctgcgctttgcgaaggataccaatggcagcgtcagactgctgaagctggttgttaatggtaattaaggcttcaaccgcacccgagttctgatcttgctcgaactcgagttctttgtagtgaagagctttagcaaaagcatgacactttgcagcatacttcccaagagtgcggatgtcgatgggaagagccttgtcatcgtgctccatgaattcggccaaattgaggagaatttgcaaaatctctggggagatgttgggagaggtaagcgccttttcgattgagcggacgagctcttcttggtattgatcatacaactcagtccaacacgaaacgaaggcagcattgaaaaggtcccttgaaagcggctggtagattccggccaagctagcacatgcacgcaatgccggggacggggattccttcaacagctcaatgctgaaacggcgtatccattcctgccaatcatcacgagtggacttctgcgaagcatcccacgcattcttgagatgttgctgattcacaacaatctttttttgtccaatctcggaaaaattggtatcgtccgtggggaaagtatagacctcttctggattgagatcctgcggaagtgggtcgcccttctggagtttcgtcaccaggatctggtagttcacatgcacgatctgattggttttgaggaccttgttgagaagatgaatgtaatgggtgaagtcctgtcccagctggaaaatgagagcacaaatgcagtccatcgcggcttgacgcagcacacgatcaccgctagccacgacccgtgatagagaatgaaccattagggatgcaaagtcagagacattgacttgccgcgataattttgtcaagctatcaatagccgatttgcggatgctctgaggattttgtggccgatcgaacaaacggacaatggaaggaatgatgagatgcatgtattcctctccacttgtgccgaatatcaaaagagcatggagaatcttctcggagggctgtcgacgaggcgaggtgtctttatcaagcgtatcgagcatcaaagggatcaggccagcaagatacttcctgaattctccttccagcgacctagcaattgcctcgaccaaggaaataatcgtaccctggatttgatatgaagcatcccagaagtctctaataacctcgattatctctggcaagaaagtacgaatatgctgtcgcacgatattcaccaggattgccatctgattgaaatagggctcaagacggctagcaggagcgcttcttatgaccaagatgaaccctggaataatttgtccaaggaatgggacacacttcagacccagagtcttgaaaattgtgacgatggcatcaatgacggctgagtgatattgcgccagggagttttcccgcaaaatgttctgcatcaaagtatggattaccactgtgggataatactcctcattggagggcgtgaggccctgcataatgagggcaacatcagaaacattttgtatttcgttgatatggtgtacgtcaggttcaatctcgctgatctgttggtacttgtaggggtcgagggcaccgaggactccgagaagcttgatggtctccttgcgtagagagcctgtctgttccgttttgatgatgttgatgagcactccgagaagatgggggtattccatgtatggctcgataacatagcctgaattactggccagctgtcctaatgtccgaagcgcagcttcacgtttgttatgcgacgaaaggtcctggagtgagtccagaataattggcataatctgcggcaaatattgtctcatctcatggccgccgacattggcgagctcaccgactgccttcaaagtagtggcagcaacaccgggattaatgtctgttgttttgggcaacaatgcggtcaccatgggatcaacatatgacctgatcaatttcgtcgcattcgagacaaacaagctgatgagttgagccgtttcctccttctgccgggcagtatttgcgaagccaaggccagtgagaagattgaccagcagttttcggagtggcgggaagacataagcagggttaacgctggaaagtcgaccgataatgcagattgcggcttctttgacatcgaaaacctcatcattgactgctaagaacaaacatcgaatattctctggtcgtgccaagtgccgatcaaatttgcggtctaatgaccacaagacagtgcgccggatttcaggatcagggtctccgatacccacagtcaacagcttatcaataacctcgctgacaacttgaatagagtgtccactggtttgattgatgatcggatcgtgaacgaacagctgacagcatgtaagagcggatgcctttcgaatctcgggattatcattttccacgtagttgatagcgacatcacgcacgaactcgtttaatatgtgcccagagaaatcaaagctgcccagtgtgtgaagtgccaatgcgatatcagaatcggagtgaagctcattgggtgcaaagtcttttgcgaatgatggcataggaggcagtcggttttcaggacacccgaggggccggaatggcgttccacaaaggatgatactcaacatatcaagaagcttttcctggatcataggtttgatgggaggaatgtaatgggccatgtcgaccagagcctgtgttaatgatttgctcagtccacaggcgaaaatgggatccaggagagcttccatgtatttgctgagcgcctgtcccactgcgagggacagcatgctgatgcactcaaacatcggcgcctcgttaactcctgaccgattcctcgccttcattgcaagcccctctcgaatgtagatgatgatgccgtcgagatattggccgatagcggtgcccactgcattggcaatctttccaatggcgatgaaggcagagttcctctctttgtctctcttgagttgcgcttggaggtagaccatgaatttgtgtagatagatctcagtgaaatcggtgggtgcatatgaggcaagaatgggaatagtgaggacgacttcggtgcgaatcttcgggtcgcgatggtccttgagacgaaggatgatttcgcaagcatcccgataatgttctttcatgaacatcgtgcccttcaagatcaactctttgatgatcaaaatggagccatggatccagtcgacgttatgggacttcaagcccagaagtgcttcgtcgtgtatccgtgcaaaccatgattgacggacttgagaatcgcgagccacgattatctcaaagcattccccgacggcctcggcggcggtctcgcggatgagtacttttgggtctcgaagggcgacccaaacaagctcaaaaacctgcggaacgaagccgtagaggagtgttggtgagcccttggccagttccctgattacaagaactgcagcaaaccgccgactttcctggcgctccgattgtagccattctaatgcggattgtatttcgctttcgaccagttctgcggttagagccccgcctggcttcgcgagtcggcccagcgatcgggccgcgtacaccaggaccgcgttatcattgctgcgaagggcgctgcgcaagtaactggcaaatctggtcgttttctgagccgcatcaactccgtcaaagtcaatgagccgatcgagtgctaacaagccaccgattctttcgtttgcgtcgctgccgttgaccacgagttgagcgatacgttggctaacagcgttgtaaaattccacgaacttctccgatggccagtctgcacaaggaaatatgttagctagtaagatgtcttggaattcaaccgttaatacctctagacacggagaggacgttctcgtagagctcgtatgcagctctggccctggcctcctcattctttgacttgagctccacgaacaacctttgggtcacgtctgagattgcgcctgcttgggccatatttgcaaatcacaccccagggtggacattggaatacaaggtctaggccataaaataagaagacgcggagcgcataaagttggatggtagagggagggtcatgtgtgaggcttggagaaggtcgatgggtgcacggaccacgtttggagttcccgactctctgtgcgactctgacaccctcggccatctacaaccactctataagtaatcactacgaactatcttggtgtttattttgaatttagtgcttggtatactatagatgactcccggtgtttgaaatttgatatgtctgaaaagtcatcttatcctcaggaaatacgtcacgtcgcttcaggttctaacatttgtgcgtgctcgatcatatagaaagacgacccaaaaggcatctagtgctgaatgcttgtcttcaagataaagtcaaagacagaggccatataagcaaccgacttcttatcattgagattttacggcgcacaggtttgcttgcatctataagtgggacataccttgttcaatctttttgtcaaggtggattcagcctcgcgataggacaaatactcaagtgtttggtatctttaagcaaaattgcttggtcttaagcttctagcataattacatagtgtcagttactatgcgataaatcaccttgactcgtactactaccatattactcgatgtaatccgcctgcatgctatccgattaatcgatgcccggactagcacctaaatggactcgaactccttggaaatttttggtgctttacacttagatactgcaaaattacttcagatcaccataaatttatgtaaaggtgtttgcttttgcacgttaaacggggtacccatttggatcttccaaggttggccagggtaaggtcgacgccacgagcgggctggtttgatgactaagacctggcgagccctggcctgcccacattttgatccatcaacttcgctgtcccgacaacgcctcccatggccagaaatgaaaaatgtcttcgcgggactccagctcctctagtggaacaaataagtttgcattcgtgacagggaacattcattcagaagctcggagccatgctatgaaggaacactggaagcggcgacatcagcgcaataaagaggcaaaagcatatcaccagagaaattcatcgcgaaatttgcctctccgttcaaagaaccgcgctagtgaagatgcgagtacatcttcagggttgccagaggttggggatatggacattggcaggaatcaagaggaatctactagcatttccgcccagctgctatgtggtctgagttctgcgctgtcaatctcgaggcctgatccgttccagacgtgtcctgttcacctgacgagccagcaccaaaagcttttgcatcactgtgcgcatgaggatttcagaccttgctatatgtggaaatcttgctgacgggggtcgtagggataagcactcatgcggctatgatgtttgcagacctgaatgtcactgagttcaatccgatgaaagatgtttggttcccgctggacctctcaaatgaatcgtctttcaactgcatcatggcgcattcagctgcgcacttatatcatttatacgctggaactcccccgcgacgagggtcgaaatcgtttgatgccttgaaatataagatcgaggctgtcaggatactacgcttttggcttagtgatcccaagaaggagctaagcgatgacgcttttgctgctgtggttcgtctgcttacattcgaggtgtgtcaactaatagcaatatcctctgtgtgagactagctgatcgcatttgacctagcgatactggggcacggtggaagattggaaaatccaccgtgatggcttacaaagaatgatcgacgccaaaggaggagttgaagcgctccacagaaattggcggttgcaacttgtggtttacctgttagtgcagatggtcaaaagtataaagaagttgcgatactgaatatttgcagtgtttcgttaatgtcacgaccgtcatggctcgagtccacgaacaacctcgaacgactctctcgtcctcttttatcgcccaacgctacgcaaaaccccttatcttgcgatgttcaaaaggtccgctgcctttggctgatatcattcatccaagatatgagaacattcatgggatcagtctacactagagggctctctgcgtatcccttcactcatgccgccgtaggcctgttgcgtgagaattttctgctctctattgatccttctacccatgagtatcacaatacagagtgggaagacgaaatgctatggtgtttattttgcattagtgtcctaatgcaggagtcaatttccgccctgtcagatcaggatttaacagcatccaatggaccgagcacactacaaggattggagatatccctaaggcactctcatcatatgtgggggcgctcaatccaccacttgcgctctatcttatacgaaagcccgacaaggctcgttgaggaagggcaatacaagatgaattattttatggacctggtgcaggttctgggaaccttgagtttggaagcgcgccaaggagtcgagaaatgtcttctcaatttgctttactgcctggggaataacaaaaccagcgcgctattcgttgaagatggatggtcgccggattcgcttctgtcgtcaatgcgcgggcgttagagtatgcagctggatttattattatatgtaagtacatcacgaacgttagaaatagaataagcagggcggagtcatgaagggttctttcagtaatatccttcgaagcaagagaactgcatcaaagctccaaagttcggaccgtcctcttcgagatgctcatcttcaacgtattctttgaggctttcgtcgtctttcttcagatcggggcggaaccctctctcgtcgcccgtacttgtcctcggtcggctggccctcgttttcatggtcgttttgctgtgaccgttatggtcgctcgggttcttaccacaaaaacactccttgtgcttggtgggctgctgagtattaatcatcatatctcggcttagcatttcaggatggaagactgaatgagtggccgaatcacgaaccgtgtggctattaactattctgtcagaatctaggatgaattcatccctgatacagatgggtcacgtgattgaccaggctggttttactgcagaaagaccaactcagtggtttttcgcctttcatttcattttgtttgtttttgattactccagtaatgatcattccaagccacaattactaacaaacattcgaataagcttagtcttacttatatctgtaatgaaaagcatagttgccatactgtcaatttgatagagagtcaatttgatagatacaagtccacatgtgcctaattcatcaccctaaaacacccaaaattatatggcctaagtccacccgaaatgacttatttgtacaagtcagaatggtcacgcttaatagcatcggcacccttctccgcaatcatgtaaacggagttctgaatccgacagtcgggaatgacagggatacaagacgcgtcgattacacgaaggttcttgatgccgtgaaccttgaggccgggatccaccacaccttgttggatgttcttggacaggcgggcggtgccgcaaggatggaatgaggtctgggagcgatcgagcacgactctcttcatgagcttgtcatcgtgcagcggcatcggccaggggtactcgtcctcaacgatgtccttgaagccctcgccattgagaaggatatcataggcataccggataccctcgcgaatggcaataatgtcgaggtcattgttgaagtagttcagattgatattggcttgctgcagggggtcgctgctgtggagcgtaaccgtgccgccttcagagacagggcggacaagatccaccataaccgtgatatagttgcccttactaggggtaggatagtgccactggaaggcactgccaaagagacagacaaagtcaagttcgaaatgaggctggccgtatggacagaacggatccttgttatcgttggcggctttcgcttcacggtacaggggatccttctccaggtacttgtcaattcgggggaacccaaccatttcaaggaatccggagcccaatggaccaccatgactgttttcgtaggcttgaatggctctatcgttgtgtggggttcctttccgtaagataaaatcgtccataccgaagccatctttgagacgaagaacgaaaggaacaccggggtgatccaggagatgctgcccgacatgagggctatcaagaatcaccgggataccgtgcttcttgagttccgcagaaggtccaataccactgagcatcaacagcttaggagtctcgaagacaccttcggagacaataacttcacgggtagcaaagagattaagctcctgaccagagcccaagataacagtaacacccttgcatgtcttgtccgcagcatcgataataaggttcttcgaatgcgcttgaggaagaatagtgacgtttggcttatcggcaatacacaggaagctgccagagcgacgacccttgtagattgtgttgacactatgagtcaggccggacatagtaccgtcgaaaatattctcggttactggatgaccagtggatttccatgccttggtgagaaggtctctgaaaggcttcatctcggggatgagttccgagtgggcaatcgggatcggaccgttactgccaatcttcttcagctcaggcgagtaggcatttgcatcgtcgtggtaggtgacactctttcgcaggtagggaacaagcggatcccaagtccactcttttccgccatactcctcccacatatcaaaagttccctttgacccaggtgcccaggtgaagtagttcaaggaggaactgccgccgaggacctttccgcgcgtgttgggcttctcgatgcgctcatagtcatctcgcttgaccattgttgttttgaacgcccagtcatactcgctatcgcgaagttccatcgcgttagaaggaactcggatcgcttcaaggtccttggcgttctcgacgccggcttcaacgactaggattctagcattggggttctcagccaggcgaccggcaacgacgttgccagctgtgcctccaccgacgacgatgaagtcgaacctggcattgtcctggacaacagtcatgttgagaagtgaaaaaggttgagaagttgtaaggaagtgaattatctgaaaaaggtgatctgtctgcggagtgagcgacttcgagacgccttttatatctgacaggttgggcttttcgggatgaggagaacgtctttcatgagataaccagcgcatgcattcctcttcctaatacctcatgtggcgtcattgatttgagtagagcaaaaaacacgcggttccacagacaagggcactgtattgtttactactggtcttacgggcacctagctgaggaaggtcttactagtgctgagccaagtgatccacccatattttacggccagtgttctgatggtcatcctagagtttacgacgtggcaatggctcataccgacctgtctcgatcatgtctaacttcgtttactacttttcgtatggtcatcttagagttttcagtgtggccatggcttgtaccgatctggctcgaccatgtcgagatgtcacaggatctgcattatagacattcggcggatatattggcttgacctagtggatagaagcgaaaagctagcttctctatccacgggatggttctgacggaatgtggggttggatagatacatagatagtagatcaggatgatcgcacctttgagcagcttaggtggagctccaccagatgaagtgggccatttgttgttgcacgttgggcggccgatccatgggttggctagatactcaattgagtttcggtttgagacacgcgaaaagtgaattgtcaagctggtggaatccagatgcacagctgcaggagaactagggctagatggctttatgcctgcttgacaaagctggtcgcaggtctgaatgagaacgtgagagtctgaaaactagtattttagtttcgggaggtcaagaatctagcacttagcaggagtggcgggcttcggatacggcatgcatgaatactcctatgctaccctaaaccgatgaggcaatagcattcgaccagttatatatcggtatataactagtgattttcccactacccaatcaaggcagaaaagcctctgttgggagtagaggagtagaattcaggagtagcgggcttgatgtacggtatggacactcctatgctacccaggatcaatgaagcaatagcattcgaccaatcatatatcgacatgagtttggtgattttcccactacccaatcgaggtagaaaagcctctgttgggagaagaggagtagaattcagcacttgggtcttgtcttaattcgtgcggagaactgcgtcaggttctagtgtctgcataaattggggtctcggttgagcggaaaactgaagttcagtcaagagtggatctatcggtttcaaggcatacgttagcttctttaggaaatgctagtcgacaaataacaatcgtgtcgtattgtagtgacgtaattatgcgggtccctgaagcttgtacagagtacctgggaccagatacagatatgatgtacaaccaaacacagtactcccgagatgacagtcccactagttgtagatctgacacttcagaggcctggaacggcagataatcgggttgagcttgaatttagcggtagctgaaagcggtaatttcgtcagaggtagatatcttactgagtataattgaccactgagatggcggaagaaaatacagtgctaatcaagatgtcctgaatggtcagtacatgtataatggaagcgtcattaacgttggggaggaatggcggaataataaagcagttcactaagaagttcattagcttaaattggagagccctggctgctttgttctgttacatttcccttcacatatcgtttgccccaacatttaccatgtctgccgaaaattattatactcttgcggaaggtcagcttttttggggggcatggggggattagcaatcctacaagtactaattctggaacaggatgccccttcgctagcaacaacaccgcgctcttgatgcggaatcgtccaggaactggcggtctaggtctgctccaagacactcagctcattgagacactcgcgcacttcaatcgcgagagaatccccgagcggtatgagccggtctatctactctacaatattgatcttaaactaattggcgttgtagcgttgttcatgcaaaggccgttgggtaggtgaaattgggtggttgaaagttggtttgcaacaggtcgctgactctcgctcctattgtagcgcatatggagaatttgaagctaccgaggactgctccaacctgacctccgcgagcttcctcagcaaagttggaaagaagacccctattctccttcgtgtttccaccgtcggtccggaatcgggctctgcggatacttcgcgagacgttcatggatgggcgatgaagatgtacaccgacgaaggaaaccttgactgggtcttcaacaatacggtgagtaacttcatggtcctatactaaggtaaaagggctaaccaaaatttcaagcctgtgttctttattcgggatcccatcaagtttccctctgtgaatcgctcccacaagaggaatccccaaacccatttgcccgatccaaacatggtaagtctccaattttgatcaccagacaatccaacaatgaattaacatagatttagttttgggagtaagtcccttagatacaagcttgattttctgcattaatgacatgctttagcttccacgtcgggaacccggaaggcatccatcaacttttgattcttttcagtgacagaggaaccccacgatcagttcgatttctcaattcatacagtggacatacatacaagttcacaaaggcggtaaggacgacagccttggtgacgattacttatcgctaactggctaggatggttcattcaattacatcaaagtccatatgaagacgcgacagggcgtgaggaatttcacacaagaggaagcaactcgtgtcgcaggagaggaccctgattatatgatcagagacatgttcgacgccattgaacgaaaggacttcccgcagtgggatgtttttgtgcaagtaatgagcccttccgaagccgaaacctatcgctggaatatcttcgacatgaccaaagtctggcccaagaaggacttcccattgaggaagattggtaaaatgactttgaatcgcaatgtgagctatggctctctcctgaaattgatgcttattctaactatttagcccgacaactattttaccgacatcgaacaggccgctttctcgccttccactatggttcccggatttgcagcttccgctgatcctggtaagctacatctccaatgttcattgaatgacctgtggttgattcccgaatctagtcctccaagcccgtttgtttgcgtaccccgatgcagctcgataccgtcttggtgtcaactaccaacagctccccaccaatgctgccaaagtccctgtttactgtccatttgaacgagatggagcaatgcgattcgataaaaattacggtgctgaccccaattacgttggatctaccctgcagccaacgcagttcaagaccaaagaaaacggtgttaccgctcagtcactcagcgtccataccgaccacgagaaatgggctggcgaagtgtcagcctacactagtcagattactgacgatgatttcgttcagcctgcagctttgtgggaaatccttgggcgcgagccagggcaccaggacagggtcatccataaccttgcaggaaatatcagtggggttacgtcacccaagttacgcgagggtgtttacggttcgtttgtcttgtatcgctttcaacttatggcttttacttactctgaactctttgcagcacttttcggtcgtgtcaatcaagaactcggggctaagcttcgaaaagcgacggaggccaaggttaagaactgaatggctcgctgtctgtccagtatggtgaggaaagaatatattgcaagggaaagaaaaagagaaaatctgatgtcttgaatatctatcaaaaattatcgcaagttatgctcaatttactgtatttccacgagaccaatgttcaaccatcgtagtaccacacacttccccagctgcaccaccgacggaaagcacgcttccctcatagtctggccacaaaaattgatacatacagactttatgcatactcaccacatggtatgaatccagctatgcagttgtacagttaaaagacagatcgttgacttttgaatctgatctgatgcacgcatacaatctacgagtctggagaaggcggatgatcaaccaatgcgaaactgtaagatagattggaacctcggaagactagctgcttccctgaagctctctagatagctttatataaacaaaagcaccaagatcatctcctctggaagccaggtaatttccaattgaactgcttctcccctgcatgtggtgtctttgatttgtgcataaggacataagcatccatagttaaattttttcgataagcagaggaagaagcaacaataatacgtaaataacattgcagaaggatggagaaaggaagctaccaatcaggggcattgcaagcctttatttctcaaggatagtgcagactacaccgatcaagcacctgacattattctcatcttactgcagtgtttataactaggcataaggatttccgagaataattgaatcttcaagtgtcatttgaatagtcagaaaaaaaaaacagctaaggaatccagcgagcaatagaatcacatcaagcctccataggtctggccctcggcttccaactccttgtccttctcgtagtagtctttgagggctttctcatccttcttcaggtagtcgtcgtagaatttcggtttatccttcttgttcaacggtccattttgcttatcagagtgggcgtcttcttcctgattgtgcttatgatgatgatgctcgaaaatcctctcgatgagaggttctttgtccttgacaggatgctgagagtctgctttgcttttgttagccccgcaagaagtcatgcattaagcaaggcggcaaaccttcaggcatgttgatatttggtgggaaatagcttggtcactttgcgatttggcaaggaaatgagttgtacaatcctgtggaacgatatataaatcacaagaagcacctcttagctttgacatttctctctggccgaccgagcttcaatgacgtggatgacctcaaaacgagctgatcccaaacattcctatacgggaagtgaggtgtgaccgcattttgagtttctatttgttgtccgatcgtggaacaactacctaactagcggacgaatgctttacaattattgtcgggtctcgaattgcgggtaaccaacagcttagtgcaatctagtagctcaactctaaatcccttgggacgccgtcggttcactgagaattcacattctctgctttcatgcccgcttttgagcaaacaacatggagcgttggtggattctgcctgggtgtaaacgtcatttagactcgtgtttgaagttagtatggggatgactgttttgacctgtctaggtttctcctacgcgaacaatagccttccaaacggacaagaaatgacccaggtctgagcccagggaagaattgaacggtcgtaccacaatcatatcgggcagaaggatacaagacgaccccaatcagggcaaacactgccctcaagtaatgccatgtctcactcaagaccgattttgtaacgggcaccagcttttttgcccctgctgggaaggtccaggtgcagaacggcagtagcatttaacgaattaggtttctgcattagtagcaaacacactttattagcagccatattcgatgtacgatagtattagaagtcttgagaacagaattggtgtggacctgcgacgaaataaacgagttgttgatccgcctctctgaatcgggtagtactaattggccaatcagaagacgtatctgccgtatatagcacgcctcccacgccgatccccgagatcagcaaagggtccgtcctactggactagcttggagctcggagtcaagctgctatactaagctttgaaatccaaatcctctgtttgggcggtacagtacagcttcagtccagatttgctatcttcaacctcgatttatcagactcgaaaatatcgacttacctccttatacctggataccgtgacgaattgagcagtgacaacttgtcgtgtttccaagaaatcaacggaaggaccatccatcaaaacgttcaaacgaacaatgagcagcttaaccaccgccagcatccaacccgtcatcgcccccctcacccgaacagcaatctttctcgttttatcaatcacaaacacctcagccattccaaccatccgctcaactctcgccagcgtctcaagtctagccaaaaatgtcgcctttcgagactccgacgctaacttgacctgcacggtgggaatcggcagctccgtctgggacgaactcaccaacaacctcccgcgacccaaagagctccacccctttcgcgaagtcaagggtgccaaacacaccgccatctccactccgggagacctcctttttcacattcgctccgaacgccgcgatatctgtttcgagttcgagcgccagcttatagaccacctcggtgactctgtgcagctcgtcgacgaaacagttgggttccgctactttgacagccgcgatctcctcggctttgtcgatgggactgcgaaccccgtgggcccgggcattctaccgtctgtccttgtcacgatggaggacgatccacacgcccaggatggcagctacattgttgtacagaaatacgttcacgacctagctagttggaaaacactaccatcagaacaacaagaggagatcattgggcggaccaagatcgataatattgagcttgacgacgctgaggacgggaagcaggcctcgcacaagacgctgaacacgattgaggacgaatacggcgatgagcatgatattttgcgcgataacatgccctttggatccccagcgagtggagagtttgggacttatttcattgggtataccaggcggctatgggtcattgagaagatgcttgagcggatgttcaaggggcatccgcccgggctgcatgatcggttgctggatttttcgaggccgttgacagggaacgttttctttgcgccgtcggctacggtgttgaatgggcttgatggttgatataaatacactgttgttttccgtcaatctcggatagctagatactaaagaactaaatccaatgagtaggtgaagaggaagtgatttattgtactttccggttccctatttcaaatagagagaacttagcattttacaacaagaactagccatgcaccagagaaagatgttttttcaagatgctgctttagtgggaaggcaggatgatttttgaggtctacatgtttccccatacttgctagctaacctacaaaaagtttggtcttgttttgctgctctcgtcttgtctgctttgccaaactgcccatcgtgaatatccctcttcattgtatatatatcaagtactgtcaccatcgtagcttattgctctacttcgccttacttactccgcgtgattcgtaattcatccttgcatggtgctcatattttagtgacgagtcgtaatgggcttgatatccgtttatgttgcggatacccatggcagtagctatgtcgttttcatccatctattttgcacagttcataatattagttgatcacatattttcgctcacgtagacatatacctgcatcaacatcaaatggagattaacgaagagagcggtgcgactattactagatcgaagtgctgactgtcaaacccaagctgaatatcatagaaatgcgttctatgccatagactctgatcagtcatgaaaagatgctactggatcgagaaagcgaaagtcactgttggagatgaggaatctaggccccatccgccctgtattcaacctgtctagcggactcagctcattgtaccttgaacaagtcagagcttatcacctattgtcttggtatttcattcgatgcctttttccgcctactgcagtaagattgctgagcacaaacacgaataaatgatggatgatcggtcaaatacttacgtttcaccgataaacaacgtccttggatggaaagattagcgttgaatactctcttcaacgcgacgtacgtgcataaaaaggctgctgtagttgtcctcccgtgtttgaaacccaataggggcataagggaagttgaaattatactcgcttcgctaaccggaaacgaattacacctgtccagagcaactttcggcaagccatcctaccatatcggaggaaagtccaattcggcccaactgtactgaaagaaagttatggggcaattactgaaacatataaatctgatcgtccgcaagtggaggtacaagtcgctatgctaatatgatatcggtgagccccactcctatatgaggaaatactacccaccaataatgtccatatatttagacaatcattcgttaattagtacttcctagaatggaatagaatgtaagataaagtaatgaattgctccattttagttgcgtactccgaacgaaacgccagttcagttgtttaacaagagtattataattatggtagatgagaattgctcttgttacatagttgagcagctcacagcaattcagcttcaaagtacaaaggaggcatgaggccatggctcagcaattgcatatgctatgggcattaatacaaaggtacacgatgcgatggaggacgtaggtaaattacaaatgacgaggtgcacgtaataaatataaatttccaaaagtagatgacatggcttttgccttacgctgagaaatgagaggtaagggggcttcgtgagttttgagccctaatttgtttcccctgcaccaagaatctcgatctcactgtccacatagtatggagagcgatggattccccaaatgaaaaggaggtaaacccgctcaatactacggaagatgaaatgaataagcgccatgcttctggtgacctagtatcttctgaatcgatactacactccaatcagcctcatttccagttcgtcgaaagcattgaaaagcctgttgcgcgcagtcatgcaatgaagacatattggagacggaagaagggagagcaacaacaggaagaatacttgaaacccaatcaaccgagtttgcgaccgttgcgaccgttatccaaaccgcgagcagtccacgaacctgagacctctaccctgctttcgccaacagaagaggcttcctccggccatgggtatctctcttgttcagtcaaaagtccagaagagcttgggatccctgaccagcttttcgctaacatcagcttcactttcgcctgtgttttgggccaaaaggttgaagcaaactcatttcagatttcagcacatcatcaccggtttttctatcattgtgagtgcgtttttaatacagcagccttactcagcaacatcaaggagactgacagctcgattttcttatttagggctgagcatgcatgcgcatatcatacattcaggacttcaggcgcggacctttactccattcacagagatttggatgccactcgatctatcaaatgctgcatcattcaatggaatcttggctcatgcagctgcagatctcatgagatttgaaggaggtagaagtaatccggagcttctgaaatacaaaacggaagccatcgaaacaatcaataaatggcttggtgatacagtcaacgcgattacggatgatgtttttgctggtgtcgtgcgacttctcacatttgaggtatgctattttccgcagcttgaagaaggtaacggttgatcgtgccaagagtcctgctttatgctgatcacgcacgaatgaaatattcacgggactaagatggttgttatacgcagagacactggggaacacgtgaacgtttcaacatgcacaaacatggacttcagcagatggtacaggccaggggaggttataaagctttcggtccaaactggaggattcagcttgtcctttccctgtaagtcccctatcatgtccataatctcattcgtcatattgcgactaaagtgtcaggctttctattgttgaaataccggaacagtcatcgtctgtgtcgtacttgatggaggaattcgagaatcttgtatacaagatattagatacttcctacttgcctcatcaatccccaaaccagtctcaccacgccaaacaactcacacacctcgcgtcattggcagaagcgataaaggttttgcaacatcgacggacaacagaggacgtcatgcgtggagagacacggcatcaacgggaagcagtctctaaatgtctgcaatgtttactttttatttgggccacgctccaagaaagtgacgagaggagtattgggaatcagtcgaagcaagagaatagtccttcattcgctctcaatacttttcttcatgcgtcacgacatatgtgggccaagtccgaggatgaagtcatgtcaatcatcttggatgacttcgccaaaagaagggaaaatatggagaaaactgtctttgttacgacggtgattgcatgtatcaaaggtattagtcttagagccctatatggggctgaacagtgcctatcgagctattggaactagccaggggatcaaactcctgaccaggcaattagaatactgaaaatgataatttaaaaacccaatcagaaataaattcaaagaccttgagcgaacaacagcagggtccatttaagggacagtcatggacgctttagctcccttataagccgcaagagaacacatggtggtttcggcaattagatattgcgcagtagctagggcactgaccagagatggcgttaaatatacgacagaaatcgccacagatttggagatagtatgtaggcgtgcatagatggtgttcagacttcagcaaagtcctatcttttgatatcaaatagacgactcgatacattttctacacaccgaattgccaacatcaaatagtgcatttgatgtggttgttctttggctgggcctacttcgcacccgttaaccaccactttgcgggtacgaagacccatagcgctcagggttcaaaccccttttaggaagtattttgatgcctgaacggcctaattagcgctactctttaaactgctctgtccaatgtaatataaatgattcatgtattaatgaagcttttggcaccgtacaatcagattagttgattcgtaatcaggatcatctaaatataatagtacctaagatatcccttaagctctttttaccacttagtcttcggttgcgggtggtggctctaattaatcttcttcgaggagacttatcattgtatctgtgctatacacagaggacattgccttccttcataaggacttgcttttctggctgaagttcataccagatgcctggagaagatgatctcggcgaatacaacagaccaagcttatttctcctcgctagtgtgttcgccactgtattgctctgcgtgttgagtgtggctctggcggtgaaccactgtccttgcttaggaagctagcacgacgaacagcatcatccccgacatcatccaaagtacgcaagagtttaccatttagaccatacatgtgggggctgggtgtgaacaagcgataccacattgaagacgttgctagttttgtgtgcttgtgcaaccttcacatccccagctagagatattggtagactcagcagcggaccttgtcaatgagaaatgttttgattggtccgctatacgagaagaggccgccaaacttggtatgtaataaaagcctttttaggctcaccactgtatctcctgctatattttgcataacagaaagggtccaactcgatgatgaatattttgtcacaaaatgattcatgcgtcggtttggctgaaaccaggaagtgaatgactcgacttccaggaacgggacgctgttatgtatgtaaaagtccactaatagaatctttcctcccccaacttccgcacgaattttatgccgatcctgagatattcacttggcctgggccattaatctccacggtaaaagcattcaaatcgtctccggttatgattccaattttaacaaattctactacaaaggatgaaagcaggcctttagaggaaatagagttactgaaggtataaaatcaaagacgagagaaagctgggtctgtctgatagtttagagcgggtgtctgtaagttattatgaagatacaaactgagaagatgcacgctagatatattatgtatctgctcaatagcgaggggaggacggctcttttctaatttttatacgcattcgcactatatttctactccccctttaggaaagtaacgctataagtctaggcccttttgggaaccggggctcatactgtgaaagcccgctactaagctactaagctcgtgagcctccagaactatactattgagcgctacatgccagttcctttcggaagaattgagtacaattgattcaagaattctaagaacgagggaaaggaaacaatctacggccacgactgggttttatactcttcctggcgacctcgccacaagccaagcaaacaccgtcttcgcttacagttttaggaagggacgactcggtctgcaggtacgaggtcgggggcccaggtttggcaggtacgcagtcggtatcagtcggcagatcgtcagatcgtcacattctataacgatctcatccttatcaaactgtagaaggaattcaataaatgcgggaaaggatctcggagattatagaaggagagggacgatggttataggctttataaagccattaaacaagctctttactagatggtaacagaagggtcgacgttctggaaggttaggatcgatcggtgaggcattttgattggtcaaaaattggtcaaaaaagtcgaaaatgacgtaacaaaactattccctcctcagccgctatgtaagtgcttctcgccatctcttcctcgcaaaagctgatgacccacagatgaatatcacccacagtgatccgagggagacttcgttggtccagatgaaacggtacctgtccggtgacctggagcgcgtgggtcagaaggtgcgccaacgcttggagtccagtcggttggcgcgagggctgctgaaagtgatcggtgtgttggccgtcactatggtgctagctgatggcctgctcacaccagcccagtccgttctcggagccgttcaaggcattgaggttgtgcagccgagcatatccaaaggtacaataatcggtatcactgatgccattctcgttgtgctgtttttttattcagccgttgggaatcacgaaattatccttcgcgttctcaccgatcgtgattatatggctcgggtttaatgcggcgttcgggatatacaacctcactaaatacgacgccggggttttccgggcttttaatcccggcctcgcgttcgaattcttgatccgtaacaagacagacggatggaggatgctaggtggtactttgcttgccttcactggtgtggaagccctctttgcggacctgggcgctttcagccgaagcgcgatccagatcagctggctgtgctacacgtttccgtgcctattgttagcatatatcggtcaggcagcgtatatcagcgtccacccagaggcgtattcaaatccctttttcaacgcggccccacctggaaccatctatccagccttggtcatcgcaattctggctgcaattgtcgcctcgtaggctattattaccgcaaccttccaggtgagagagttgcaacccttgatttgggagaaggtctcactctgacaatgctggcagcttcttgcacaagtgatgaaactctcctatttccctcagatcaaagtcatccatacttctcagatcttccacgggcagcttttcattccgatcgcgaattggctgctaatgatcggaaccatcttgatcgcatcgatctataacaacgtgagtggcctcttcctttccctatttcattcttttccggcgacttatctcatgtcctccagacgacgtccttgggtaatgcgtacggcgtatgcgttatgtttgtgacatttttcgacacctgcatggtttctctggctgcaatgttcgtatggcggatcagcccgtacattgtcctcctcccgtggctcaccgtggcctgcctggacggtacatatctctcttctgcgctgaccaaggtgcctgacggtgcctggttcacgatcgcgctcgctgcaatcctcgccatgctgtttcttttgtggcgatacggcaaagaacagcaatggttcgccgaagccgaggaccgcgtccccactgcacatttcgtcgtatccggttcagatggtcaaatgttcctgtccaaacgatacgacgaccttccagtcagcatcacccctggtcttgggatcttcttcgacaaagcgggcgagacgaccccgattgtgttcagccagtttgtgcttaagctcacctctttacctgaggtggttgtattcttccatctccgcccactcgagcaaccttcaatcgcccctgagaatcgatttaccgtgtcgcgtttggccattccaaattgttaccggctgattgttcgatacggatataatgacgagatcatcacacccgacttggcgagcgtaatagtccaccaggtccgggaatatctaacgtcgagcagtgccagcatgcccttagatggggaggatgagggaaaggattctgtgactcctggcaactccacgacggaaggcagtagagacgcccgcgctttcctcggttctgaaattaccattctggaagcggcatattcccacaaagtgctctatattgtaggaaaggagcagatgaaaatcaagcccaacacagcacgcatccgaagagccttgctactcgcgtttctgtggatccgggataacacgagaaacaagatggccaacctccggctgccaatagacaaactgattgaagtcggattcctcaaagagatataagtgtggcgataagcgatctggatgaaaaaaggcgcaggatgttgaagaatcagcttgaatcgccgctgcgacatagtacctccgtgtatctcactagcgaactgtttatattgctttttgtatgacagatagtgttactgttcgcggacggtataaagtacctcttcgttcagcggttgttccaatcttgttgtctccaatttcatcttattcaggctgcctaataggcgcagtcctctcatcaacccaagacaaactgattcagagatatcctgagatccatccaccgcacatatgtttacgttttgcctttcacaaagtcaatagtcaaaatttgaaaatggttagaggtggtgcatcgccaatgtttataccggcacaaggtcacgatttttgcatcgctaaccatggtcaaaggcgagaagcaaacccctagaatatatgttacgtatacctagggggtgacctcggtatgatggcaagaaccaacgttggaaggtggtagagtccacattgggagaccggaggtacatactttccaccattttattggcagcggcccaagtcacatcgccttgatcaatatctggttgtgcctttcttttttcctctctctttttcttctttccatctgtctatcttgacgattttcgactttctatttttcctcttccactcaaactatcttcaagtttacatttgaatcccaggaaaagatgattcgaacggcgacaacgctgagccaagccataaatgaactccgcgctgctaggggcaatatctcatctccgcagttttatcaactgatacacgagcaagatgcgagactcccttccgttcgtctatcattgttaaatgcctctgaagtcgaatacatactgtgcctcgagccggctaagactaatcagggattggattcctttcctacaatcgccccgcccgagttattaagtgagccacaggaatcgcagagggggatctcgctaacttcttgaagtcaaaaatctcgcaatgaccgacgatgctttgaagaacgaaaaaaacgctgaagctagtatgcgctggaggatgaatcacttccttctatttgcatttaacacagcaatggacacgtattctgaagagaaaagacttctggagatccactgtgagcctagatggtcattcggacccgtccgatataaggaccaggccgtgaagctatcaggatacccatcttacgccctatggtacggaaacgaagacgaagccgctttgaatgtcattgtggcccagaatacgaggtttaagcggcatgataagggaattccggaagttctaggatacatgggtgagtacaatgtaccactgatgaagtgctcattaactgatttggtcgaaggtttcgtccatcatcatcgcaagaatgcaaataaattgaattctccggtctatggggttgcaacggactctaaaacgtttcactttgtcaggctggacaatgattccacggtatacttattcaatatgtctcacttgattgaagagttacattctaataccttctagtttatcaccgcaacactggactctgaggtagatctagaaaaggtgttcagtctattggttcatatcttgaaagaagcattgatcgtccaatcgactcaaccgaaagagccatctatgcaatctaatcaaggtgaaggatccgtcgatcccctcgtccccgtcgggtcttctcttagacgaaaggttgccaaggagacacaatatgaaaagctgaaagtggccgcagctgctttggatgaggagctcgattattatgacatagatgtgagggacctcgaactcgaatttcccgaagacgagacctctgaagatgagtattctgaagatgactaatgctttgaagttcggctccaaggttgcttccaaggctatcgttaccttttttgctatttgctaaactgggtgagcgtacaataacagtagtcacatcttgtctgatattcacaacaacaagcaattatttaaacatatcctgccttctaggaaaagtgtcttttgcgtagtgtagctatgagaaagtcaagtttattaatatggttgatcctacgccgattcatgatacttggtaaggatgatagacccatctcaagggttgagatccatattcatctcttcggaccccaccccactgtaggtttctgctgaggtctcctttgaatgggctggggagatggtagctgccttccggagcatccataccagcaacccgaacggctgctccagagctgcctgacgaccgacaacagcaaattccgaccactagtagatgttagaattccgagttcctgacgttgggttcttggctgatataaactagctcaccttcgaatcgtgactgatttttagaaaatgccaaactgatccagtatacgccatcccgtaaacaccacagttgcgcttctggtcattcttgcgtccccggtggatacaccctttgataccaattagctttcccaaaaaaagtatgacacatatagcgagatacatacccatatatcccaggagttgggggattggatccttggacttcgctccgcccttagcctcaacgatgaggacgttaaggcacaagccctcgctctcaccataccagacactatagtccattcttcctgagaaaacaacccgcttatgattaagagtcaccgggccgaaagaataggccctctcgcattgaacattcaatggctgggcatttgtgagattcgaagtggcagtcgtgtacgcattgagggtgacagcatcaataaaccaccgagttctagcttcagtgggtcgcgagcgaccaaatgcctgttcaataagagccaatgtggtgactataatgaattagctgtataccccttctactctatgtctgatatcacataccgaggtgggggggtagggcgagcggctgaacattcttcatctccaggtcataggcatcgtattcgagccgaagagacctttcaacctccttcaaggtcaggtctgagactgggacactgtcgtagcgtttcatctggccctcgaccttatcagttgcagtcttcagctgttgtttgtcgatcctctcgtcgaggaacttccggaccgacgatctgagctggcggaggagcttatgacgctcctttggtaaaatctctgtggcgatcattgcttcgccggtggacttctcggcaccaggcacgccctccatacgctcggcactaccgctcatcgttgcagagtggctggtagcgatgtctagtacggtgcaaaaaattggagtgatggaagtggaagatgcaggatgagaggagagttgatatgggaagaaagaagaaggaaagtactctagaaaaaaagtaaggtttcagccttgtgggcagcgggtgatggaccaagggtccacggatatcactaatctggtgcggaccggtatttcctttcctctttattttctttccagctctcgctgtgttctctctttgattcaattttcaagtcttcaagggagactcattcaagctaccaaaaggcaaaccaccttatcgcttcttattccctatgttctcaaccagaatggcagagtaagacccttctccattaccagctgcccgtaaacgaccactcgaggtggtggcgcatacgaattatagtttgttgagcgtagacgacgcaaattccgtctgaatctaacgtactatggcttacagccggcttctatactgtaatgaccctaatacggtccagatttgacttatggcctgcagccggctttcgtttcccgtggcggaccgtatacggtctgaatttaacttgcgaataccagaccgaggttatgttaatgaaagaccaaagaaagtggttctagaacaaagaataggtgcgaatgtggtagaatgctagtttctttgatggttgtaaggcggccgcgactgaaagaatgtggatgaccacagtagataggatttactttacttcctaaaccgaaagcgaagttaatgtttgcatggtttgcaacagggtcgccaggaagtgcatgaaacccagtcgcggccgtagaatgttttctcttttcctttttccttccttatacccagaatccttaattgactatacgaacgggcacgcaatacccactctatagaccccgaaaatcctttttataaacctaaaccgcctatcgcactcggtactataagtataggtaatatgtcaagtacccacactaatatataggagccagtttgattgctaacgggccgtgatctatagatggagatggaatggtggacacgacgggaatcagggccgtccacggatccccgatatttcggtcggagatgacgacagtcaggatacgccagacgcatgggcacatcatattatgagtttcccatggacgactcctgctggtgtaaacatcgtcaagggcgcgacagtctaggtcctccatcgaaagaatttccgggacaacacgcctggtagtcaccccatgtcgctttttgtgtacattggttatcgccggtctcgtatgtgtcatctcgacgaatagcgtatccctttacatattcctcggacattgttgagacacgattgacgcgagcttagaatcaacggtaaagggatgcggggtggaatcggcctggcaggagtgttgcgatggggaaacaacattatttattacggtcctggcaagactgctgaaagtgggtatgcttccgggtcgaaatcttaaaagactgggtcttcgcccgttatttgaggccagttacattccccgtttcgacggttcaatccagctctctatcaagctagacatctataagtgattgatctctctccctatgccatattttgtcccaaatttcgctccatcacttgatactggctgcctcattttttgaaatccatgcaagttcctgccgatttgagtattaatataccaggaagggaattcaggtgccaatagtcctaccaattgcacaagctcccgaacagcctgttccatataatccaaacttttgacagtagagatttccatagccgtaataagactaacgagcagtctttgatccttttcctcgaggtgataatccatttcaatctcgcatttcaatctaccaacatgtgatcgtaggcatttcctgatctccattcgtaccgatgtgttcttagcaacctcatcaattaattcagatgcctgaaccctttgtttcaattggttcgctcgctgatatattttaacctcagttggttatggctttagattgcttttgaaaggattcagcggctcaccatttcatagatttctgcaacagcaaccgggcagacatcatcccatttgctcttgagatgcttcagaaaaaggtcgaaaatgtcgaactctgagcgaggaatacaaccatttggaagtctgctacccggaaagctgctaaggaagacatcggcctttcctttcgagtctggactcctgacccatgcgataccgcatggctctgggcactgctcgtcgtttccggggatatgttaatatttggccgggaacgcaattgatacgtaagttatctcggtttcgagaaagtttttgccgatgtattgaacgtattgtgatttgccaagttcaaatttcatgtcacattcggcattgaactgtcttggtacacgagaccaaatttcgtgctgtgcacacacactgtatcaaagttagaatatagaacgaagaccccaattctttactcagtataatgttcgccgcccttcacgtgggagcaagtcatacttgggctttaggattggctgctaatcaaagtgatagtcaggaatgtattgattgatttgcacccagtaggtatcctcgtttccaagtttaagccagtcacttgaccgcatgtattcaagtgtagacattgagcttagtagcttcctcacaatgctctcgtttttttgatgtagagcgtattgtaaaggtgttcgtccagttcggtcttggcagtccagcaatggcccctctattttatcttccatcaatatattaaccagcctctcatgttgatggaagcacgtaaggtgcaaaggcctggttccttcgtaatcgcacctatccaaaatccagggatcaacctctttgccccaaagaacaagctttctaaacgtattcaacaatttttctagcccgtattccttttcataagtttctgaatggcgaattaagtagttcaacgagaggtctttgattttcttttgtgccatcaagcccacgacattctggtggttcttctctactgcccataacatcggagttcttgcgaaagtcccgtcggtttgatcggtccgatttggatcaacgtctttgtttgccaagagatattccacgatttgactgtcgccgaattgagcagcccaagagagccagatgcgtccaaatttatcccggcggtctggtaggagaagggagtctactaacttggcgaggtcgtggcgaggaaccattcgattttgtggtgtaagatcgattggcatactgataccatgatctaatctagctttaagaagccaccaaaagcctgtatgctggtcgccatctttatgtgggtcagctcgatagtcaagaagcaactgcatgatcaccacacgcgacttgcccgcggcaagtgagaaaggagttcgccctcgtgcgtattgatccacgttgacgatggaattctttgattccagtagctgtctcacggactcgacgtccgattgaataactgcgttgatgagaggggtgttgccttcacaatctgctaaatcaagatcggcatctcgttcaataagaagaccgataatgtctttttttggcctcggaggggcctggactcactgccattgacaaaggcgttcgaccataggcgtctcggtggttgactttagctgcatttgccagaaggtactgaacgattttggtagacccaatagaaactgctcgttgtagcggagtaggatcaagaccatcatctggattgatcatcgcattctcttgctctacaagaaatctcacggtctctaggtgaccaagttcgactgcacgtgatagtggagttcgaccctcactgtcccgccactccaccagggccccagctttctttaggagctttattgtttggggctgtcgtgattccaccgccaaaaagatagctgttctgcccttcgggtcggatagatttaggtctgttgtctttctttttaaaaatttgtcgatagtttccggtcgcatcgtggcttgccacaagggagattgtgatatctcgccgtcgcaaaagttcacgttaaaatcgtcacatttcaaaaatgcttctattcgttcgagtatttcgttctgccaatattgcagggccttcacattcttctctccttttcgctttcgcggttctctttggagtgtattcaaaaattctgccttcagagtgtcaaaagattccagaggaagggaatcactggtcggtttttcagtcatatttgtcgtagactgtggttctgatatcacaagcaagcaatagggacgaagtttggtcttggaatttagcgatatccttgaaaattctttttttttcaacctgcaaaaggtcacaaatttaataaattcccttaagctgagtagccaaaaataacatgcatggcccccatatgtgttaacaacttgcatgttatccaatgaaagagttatgttccgatggcacacttagtcgcccggagttcactaataactcattcggcaataagcagggtgaaatctaggtgagaattacccaagtcgcgcgaccaccgcgttggcccccttagctgtacatccacatatcggatattggatgaaggaaagacatattattggctacatgaaacaatatgaaagtggatctgtggcagatgactaattttgtttacttttgaccctttgggctttcctgtgcgtggatctataaagagccaacatcgcttaacatggggctcaaatcttggataatgtatcctccatcaccaccttaattagaactcccactcactgctgtctagagcccaattaatcttgtgaagggggtttgccaagccgtacagaacgtaatatgagtcagaccatgtctttgggggggagagaaactcagccgcgctgaaaccgcacatttggctagggaacaacagaaattagcacataccctatagtaccaccgtgggaatggaaaatcactcacattgacccagatacctgatcatagatcaggtttgttgtcgtagcgggggttcggctcgattccacatggcagaaactgtcttctcaataagtcagctccaatatcactgaaaggagagtgataacaaactcattgactcggcgaaactctcgacgaatgtcatcgcgagcgtcacgatctaggctccagaaatactcatccgaaagagactctccaggcaccttgtcccatacaatacagacagaaaatccccccgggaccgcatcgtcgttcccttgttgtgcctctttgtagcccaggagggcggaagtaacattacatgccatggacttgagcctttgaaatgcctttagtccagtgggtatatatatcggaatagcttggagtgctctggttttgggcttagtgtactccgtgccgatggttgggatctgacggtggattctcatgaacgcaagcttttgagtcaagtagtcctttcggtagcaaagaaactttgccatagtttaaacagggccatgacgctcaacttccttctggctcatcagaagggctgattcctcgagatgttgggtgatgatccatgtttgggcaggcaacgagacatatggatcggcatctgttgtgatctcactgccttctaggctagccagaaacggggttgtgacctggtgcatgacaggctgatatatctttgcgaaacagagcgaaagtttgttgaaatgtaggcgcggaattggagagaatttgagaaataaaaaagatgatcaatgagtgaccacaggactgaagtggaagccttaggcttcaggctttacttctgtttacatttttctcttcctctttcctcttctttttctggataacctttttgtttcaattgattgttccaacaaaaacctgtgagtcgcactgcgattgtaaattgatgcattattttggaggtagtatgtgtatactgacgtcatattgcctatactagaatataccacactgagcactccccactgtggagtatggagtatataagcttatgttttgaaagaattgggttaggcgttacctcgtgattgattgttaacaagcggccaagggacggcggcttcaaaagtggggttctctttattacccgtcgaccttgccagcaagggtgcgttttggtcacaactcacggccagagaggaagattaagacatttattgtgggtacaagtccctgcgaagacatcggagctcgagcagaaatgagtttgttttcaaaactcgcaaatcatgcgctggacttcacctccgtcgccaaaagccatctccttttcttcaatggcggagattcaggctccgtccggggtcatagcgcggggtagtgcccgtccggggtaaaactcgccgagcccatagcccgcggatgagatgacaccgagacgtgtcctactctgggattcgtcaggttctttaaagatcgatattatttatcttggatcctacacgtccaatcgccacccagaccatgttctacagacatagagagatcaagcatcatgagcatccaacttcgtgttcggaggccagccgtcgaagacactctgaatgggtcacgttgctgaacatttgcccgtgtccaggtggtactatatatgtggagccaagcatagcgctaactaataattagagcttacgagtaacctctcctagctcgtcggttaaattccaaggtttactcgctcattatgataggctcgacagaggatcaggagggtcggatttcagagtggacaacaaggaaaaccctgggacgggacacaggcatgactcgcactgactgaacgcgggaggattctggactctcccctaagatccaaaggaggatattctccggcgaatagaacgccacatctagacgcacaccaccacatttcagcataccccgcaaatgcaccagtaaatttcctccccgctattacctatcagggcgagtacatatcagatcacttcgcttgacaagaacccgccataatcaagtgacgctactaccgtagtgccgggggaaatgaccctcatgaatagagatgtcggcttgtggaggtcaaggtccggagaaagcttcacccaattaagctaagatcgggaccataatcacgagcatgtcgtcgcgggtataaagatctgagacccccagtcgtgcctgcctctcttccattcacccgtttccccagaaatcgtcaatatgaatagcgacatcacagagaaggagacctcagcgttagaggtcgaggcaacgaattttatatacaacgaagttcgtagtaaagagggaatttcgttattactatggcggattaattggtaggccggaattatttcgtttaaaccagatattcgttataaccaggttcgttataaacaggttttactgtactcagatggaaagatgtctgcgttgctatctaactatgcctcgggagtgcttttaatcacatggccgcttagtcatcctgatctagaaaccccgcagcaatatgtatctatcctctttcttgaatatttcacacatctagaactccataaattatctctcgcaatggttaaagttctcttgactggtatgtgattttgacttaccctcgagcccaagctaactatctactttaggaggcagtggcttcatcgccgcccacatcattgacattcttctacaacatgggtatgcgttagccaacatgaaaatacagagtattggttgacagttttactctagttttgatatagttgttactgtcagatcggaggagaagggtaaacgcattattgaggcccaccccgatgtgtcgaaggagaaactctcttatgtgattgtcaacgatgtagctaaggatggtgcatttgatgaggttagtagaacatcgtgcccctgatagatacacaactaacggaaaaacaacaggccgtcaagtcagaccctccctttgactatgtgctccataccgcatctcctttccattttaatgttcaggaccccgtgaaagacttccttgatccagccatcaagggaaccactggtattttgaaggcaatcaaggaatatgctcctaccgtgaagcgagtggtaatcacgtcatcattcgctgctattgtgaatggcaagcagcaccccaaggtctacagtgagaaagaatggaatccagtgacatgggaggaggcgttggaccactcgcaagtttaccgtgctagtaaggtaagtgatactggacggtcagcctgagtaaatgcaagtgctaagtcagttccataccagacctttgcggagaaagcagcctgggcctttgttgagaaggagaagccgaatttcgatattgctaccatcaatccgccactagtatttggcccgatagttcattatctcaactcccttgaggctatcaacacctcgaaccagcgcatcagaaacctcatccagggtcaaatgaaggagaaaatagccccaacgggcacttttctctgggtggacgtgcgtgatgtggccctcgcacatgtcagagccatcgaagtccccgaagcaggaggcgagagattctttgtcaccgctggcttcttctcgaacaaggaacttgcggatattgctcgcgagacccatcccgagttagagtctaagctgccccctgcagacgctcccagcgacttcccgaaaaacatctatcagattgacaacagtaaatcgcaaaagatccttggactcgagtaccgcccactaaagcagacagtctcagacaccatcgattctcttctagccgtcggtgcttaaactcatttcatagatccagattgaattgatggatacattatgagagaacaaatcaaacattcttcttttacaacaacgtatatgagagcaatttcaagcaataaattccatcaagtgccacgcgtcttacatcttataataataaacatgagagttacatcctatagatacaaaactgtgggttaactacagaacggcggtctcggtcgttgtcgcgcaccgtaccgctttggcccgtgttctccggtcaacttttctcgcgccagctatccaagatcacatagtcaatccactgaacaagatggcctccgccaggctatcgccaacggcgaacttgctacgaaactcgcgtttgttcgcactccctaaaactctcaagggccgtagtggccaaacgtcgagagaatccgacaccgcgactctgcattatcccattcgagcctccatcgttacaccgcaatcatcactagcccgaggcgattggggattgaaacgaccgttaccggctaagtcaacatcagagaaatcatcgaggcctgtcgttagagtacacgctctcgatacatatgaacatgtcaccgacttcgaatccgccgcagatcacaccgtcaccctcgagaagttccaggagctgcacatgcctatgtctctcccctccaaagtcaattacgctacaagtgttgtgccaagacatcaaagtccgttcgaagcgcatctcgataacaccgagaccagccagggtctccaggaacctggtgccaagcaattcagacacaccggcccttggcttgccggacagacggagtcagagttcgcagcgtacttgaagcaagtgactcgcaataagcctgagctcctgaagaagcttcgtgaacagtttgttgctaagcggtctgctgagatccggaaactggcacaggataatggagaagacttggaagctcaccccgcaactgtcaccgatgcggagttcaatgcctacattaaaactctgcgcaatgacccattcgctctcggtcccgtggtctatgagctgcttgatctcgcttccccccctgccgttcccagcgagcgtatcgggcgcaagtactatcaatctcctggaagcaagttgtcctcattcgaatacgccgtctcaggacccccgaagacacacccgtctggtggtctgtcatacacacgatcacacgcgctgattcacaaccatgcccagtttggcccacaagcccaccagcgccccgtggaggctcgtatcttgcgccctaagggccgctttaagggacgcatggcgcgtgccctcgcgggtattggtggtattgctgtcgaagatttgaatgccatgacctttgtggagcaaggcacaccccccggtctgactttcttcgatgcgtccatccctggaggaggtaaatactgggttactcctatccgggcttcggttgactccgacggccgcattggcctttcatcttatcgcgcgagtgcaaccgccaaggctccttacggcatcgaagactaccacaagccgactactttgactatctccgatgttgccactgccccatccccgttggtcccgagattggacagactgccactcggtcagcctcggttccagccttccgcggagaaccgaccccggaggcaacccacgagggggacagaggatgtcgcacgcagccttcttaacaaccttaactctaagtcataggggaaagtgaagttttatgaggatgtgcaagggattgtaccatgtatgatagatttggtgcttgtgtaaagctattttcgttttcttttctgattatgtcatatataaggtgcatcaatatcaagttatttcgacagcggtaaaacaaccagacaatagattcaataattgtacgtatacttgaggatgtacttttgatttgtttcctacctttggatatcgcgaaggattacataatcagataagatacgtaagccacgtgactgcttgattagggccggcctagggcaatgacccacacaggactaagcgaaacccgatttctcaaacccatccaaatcagcacgactactctggatctttcgaacattcattccgccagccaacaaccgccaaaatgggtcgcgtccgtaccaagacagtcaagcgctccgctaaggtcatcatcgagcgttactaccccaagttgaccctcgacttcgagaccaacaagcgtatctgtgatgagatcgccatcattgcctccaagcgtcttcgcaacaaggtgagattatatacattggcaccaacaactcgagatctccaattctgatccgaaatctcttctagatcgctggttacactacccacttgatgaagcgcatccagcgtggtcccgtccgcggtatctccttcaagcttcaggaggaggagcgtgagcgcaaggatcagtacgttcctgaggtctctgctctcgacgtctcccagaccgagtccggccagcttgacgttgacgccgacaccaaggaccttctcaagtccatgggcgtaagtttccactgcacactacgatgcgttggcatatttctaatttacctctacagttcgacaacctcaaggtcaacgttgttgccgtcagccagcagcagcaggtcgagcgcccccgtcgtttcggtccccgctaaatccagcgcccggaataacgaaaaaaacaaaagttcatacctggccttcggtcgacccttggcggtacccaaatgtctgttctggctggcttttcgctcggctagcatggtttagcttagtgtggagggctattcctggatgaggaatgaataaacatgattctctttgagaaaggtgtcgctgattctccgaaaggagatgacgcttgattgccaattttccttcctcgtgtctacctacccatgagtttactctctggtttggacctacgtaggagttcttggactgggggttacctcagtccgagagactcgagacttttggtggtttgagtcatgcctggatttatacgtacatattctatatatgtacgagtcctgctggccagcctatagccatacatatggtctctgtagattgttcattactcatgcgtcaatgtcaacattgatcgggtattaataagtagaacgccgaaaatccccttcgaaatcccatagcagcattgctatcctcagatccgatcgagcaaatctatgtctccatcttgatcgacgtctcgtcgctccctgggcacgtatccttcaatggaaccgccccttgcatcctccggtcgcatctgtggagcggcagccacctgctgagaaccacgttgattctctctaatatcaacgttaacacgtccatccggacgaatcaagctggtatcgccgcgttccaacgcaagctcccgggaccgattgcgattcccaagtcccatgctctgtaaatcatccacaacggatgagatactgctagtagcggcgggtgccttcaagcgcttggcgcgagcttcctcgagtaatagaatagacgtgccccgcgtatcgcccgcccgtcgttcccacacaggcttctcagatagctgcacccggatccaaagagctcgctctgcgcatgcatccgagcaccacttttcgatgcggtcctgtgaaacaatctccacgctgcgtccacgccctcctggcccacttcctttaggaccgtatttaaactggaacccgcctcgcgggccgttgtcttgcttgcgatgcttgtggggacatagagcatacccgcacaagtcttcgaagtttcgctccaggatcagattgtcgtagtcgctggggcgaaatggggctagcgaatatttgagttttacagcatcttcttgcgacggcgcggctgggtccgctgtcggagaagaggggagctcgaggagctcaaggatgcggttaaggatgacatcttcggcatccttttgggtctgaatctgctgcgcgtgttccagtgcgacttcgaggtgctgctgggtcgcaccgggcctaccttctaggtatttgtcttgctcttcttgtgtagggtataggtatgaaggtgggggtcgctgggcattgatcgcggcatatgtctcgggaagagaggtcttgagagcgtgacttggcccttggtgtgccatggttcttaactgaggcccctggaggataagccaagggtagtttaaattgaagatgggttgagttgggaagtgagaggaaatagaaaaaataaaatcagcagaattcgactccaaagcggaagaggcaaaaccccggattgacccccaatgggaggagggacactttgactgctgacgtaggctttgggcatccaggatatgtatggatgtgtggaggttttatgcttgctatttgacatcgcataacttgtagatattgacatatggtatcctacaatatgcattatatacatactcggtacagtctacatatggaatatttctctcgacctaggtagttatatagcttcgacgtcaatagcctagctacataccaaactatttaacgtacatcacctaaaaacaagctgaatacccacatatatctagaatcggtataaattcccttggtatttcaacacatctaggcattttcccccatgtgcgtgttccttggttgatgtgttaagccgccgatcgtccagtggagcccatttccctcatcccgccaagtgacgaccacctcgctgctccgtacatcctcctcccctactactttttttttgtctttccgaccgtgttccttttttctcatcttgcatcaattctctactggccccggctacggtgttcggttctccacgccgtgagtgtttccgcagtcccccctccccccctcatctcccccgtaggcatccactcactgacgtccgtttcatctaagctgacacgccttcgtaccacaaaggaattgattcgtttcgccttaaatattgctgcatgctaaaggcattgaagccggcgattcgctctgtacagatattctagcatcattgcgtcacagactcgttcagcattcctcactccacaccgattgtcctaaggcctgaacatcggtctcggcttgccagatgtcagttccgcccttcacggtccgctcggtcttcgagtacgcgtcgggccacgatgatgacctcaacttcccgatcggtcaaatcgtgaccgtcaccgccctggaggacgacgattggtactacggtgaatactcagacgcccagggggccagacaggagggcatcttcccgaaaaacttcgttgaaaaatatgagcctccggcccctccgaggccatctcgacccaggcccaaaaaggagcccgagacgttgccagtggagtctcccgtggtcgaaagcaagcaggctgagcgcgagcccgagcccgcggtgcagcctacagaggaagattatgggattcaatcttcgcagccactgccccagtcccctcgtctacatgcgagtgcccctgtatcagaagttgtatcctcgcccccgcagccagcaaaggcgcccgctcccgcccatcccgtggccccaaccgaatccgcagccaaagcaccctcaaaacctgcgcctccagctgtagcggataagccctcggggtcatcattcagggatcgtattgctgccttcaataaacctgccgctgcaccggttacgccattcaaacccggtggttcccagccatccttcgtcaagaagcctttcgtcgcaccacctcctagccgggatgcctataagcctccaccaagggaacctgcgcccaagatctataaacgagaggaggatccagatgtgaaggaacaaattgcccgcgagcctccggtttctgaaagccggcctgcccatattgaaggtggcgaagagggagcagaggaccagcctaagccaactagtctgaaagaccgaattgctttgcttcagaagcagcaattagagcaagctcaacgtcatgcagaggcagctcagaagaaagaaaaaccctctcgccctcccaagaagtcgatggacgaacccgtggctcccgcagtcctcgacgaggaacaggaacctccctccgttgaagaaccaccggctactcgcgatactagtgttgatacattgagggctgcggcccctccttcacagccccctgccccattctcacccacccaggaagtcgcgagtgacgccaatgatgccgactactccgctgctgcagactccgaggatgccggcgaaacatccaccagcaaggacgatgaggaagatcaggctcaaccgcgtccagtttctcgtcgtcaaccgttgactcctgcagtcgaacaaactgccgaggcagatgttgaagacgagggcgatgcagaggaagaggaagaggaggaaatggaccctgaaactaaacgcagaatggagttgcgtgagcgaatggccaagatgagcggaggaatgggcatgatgggtctcttcggcccgcctatcggaggtatgccaggtatgccaggtatggctagtgccggtagtgctcgcaagcccaagactcccatcgagtcagagaagcggcttggagagctcgaatctgagcccacttcccctgccaatgcgccccctgtccctatgatcccacttcctgggatgaacgcggctagcaagccggtaccttcttatactgaggtggagaaggaagaggaggagcctttggcaactcctctcactgaacaacaccccgcacgcgatgtgccagacgtcgaggaggtcgtccacgaaggtgcactgcctcgtacctctattgaccgtccggccccggctccaccatctcaaggtaaattattctccagcagtctgatgcatggttccaattcctgatagtcgcagatcgttccgcgcctcctccgcctcaccgagagtcaaggcccgtcccgacagttccagtcgagccaccggcttcacctccgccagttcctgctggtaagtacccagatccggaagcaaattatacgacctgggcattaacgatgatatacaggtcgaccagctcctcctctaccacggcccacaactgccgacaagggcgaagagtctgatgatgaattgtcggtgcacacatctactctgtcgttgaataattcgcctgctccaccacccgtgcctacacatgcggttcatgaacatattgactctcgccgatcttcaatatacgaccctatgccctctacggcttcgacccccgcggctgaaaagagagctagtcgtctaccaccccctattccagtcaatccgccaatgccaccatcggcgcagggccgcgctccccctcccctgccttctgaccagcttcgtcgccgatctaccgtcgacagtcgcacgagtgcgttatctgctcctcgacaggctggagaagaagcggaaggagaggtgactgaatatgatggagactatgacacagatatcgcatcgggtgtgaaacacaaggatgctctgaaagcccacgagcgtgaatccagctttgacgagggtattttcaccgacgactattccatccagtctccgcgcagcccccaggaatcccggcatcatcacctacctcctcctccacccacggctcccagagcagttccgcctccaccgccaagccagccgccccggaatgcacgtgcgtctatcgacacacctaggggaccgccgccccctccgccggacagagagccaaacagcgatgatgatgttgaatatgaccctttcaactacgctgctccccgacatggtcttccggcgtctccacccgtcccagtcggtcgcccagggccgcctcctcctttcccaacacaagcggccgatgaatttgacgatctatatgatgcccctcctgtgcaaagcccagtaagagaaaggagtgataagcgcctttcactggcgcttccccaaggccaggcttcgggtttgccatccccgtccgcagctcgaacccagcgcgcatctgtggatattctaagaagtcagcccaatcttcgccgatctatggatgtttctcgcccatctattgaccaaggctacatcgccaccgatgttgatttcgccgcgtataccctctggtggactaaacccaagacaccgcctccagctttccagaaccgtactgatctgcttttcgaggtcgaggagactgcatctacgaaccgcagtggcaaaacgacagtctctaaggacgtctatattctattcatcgattactctcagacagtgttgaatgtccagttcgatcccaagaaccccaaggatgcttccttcgagcagcgccatgaacccccaccgctcccgtctcgccaggatcagctcgagcaggctcacattcagcttggaacccgaatctcggaagccgtcaactcggtccaaaactctaccgttggagacggcactccgttcggattggtccagcacctgctcagtcctctttccgacgcgctacttccggtggggacccgcgcttacggtgcctcggtttattcaaacctggccaatgcctccgtgtctcagaacgatgaaatccgcgctggtgacattgtcagcttccgcaatgcccgattccagggtcaccgcggtactatgcaccagaagtacagcgccgaggttggaagacccgaccacgtcggcatcgtggtcgattgggatggcacgaagaagaagatccgagcctgggagcaaggccgcgagagcaagaaggtcaaaatggagagctttaagctcaacgacctccgtagtggtgaatgcaaggtctggcgagtgatgccccgtagctgggtgggctgggaagccagtaagtaacaggatggtcttttttgttgctgtgattgcgctatgagcagacgaccctttcttttgtgtttttgcttgccccttctagattgggtgagatcatgtatgaatgaaaaggtacctcctttctcccctgtcttctatattcttctccctcttctcttgtcttttcctgtcctgctcccctctcgcgaatcatgtggacttggtgtggtaatgtgagatgggaaacggtggtccctatgtgatggagagttgagcgagcgtgcagcttttcgtttttttttttgttaatggtacatcttgcatgattctatcccccgcaaactatgagatactattctcgaatttctgatgtataagtggtcatgtcttgattcgtagataagttgccatgtagggaaattgtacatgctgcttaggccaacgatgacgacaatatatctccttaggggtcgtctccggtaccgagcacggaatagtcaagtttgtactttgcacgagtgaggataatgctcacctgcgttctagacctcgacgcccccgtctgaaataaattaagactaggattctagcgagctaacaaagttttctctaattaacggatcgaaattcgatgacggacaccaaacccaattgccgactccacctgagaccaattcatactccgtatgaccgtcagccgagttaaaacagtgcgtcaaacttggcctaacccacaaccaggcacaaacctacaatattgaatcgatcttgagcaccgtacggagcacagtggcgaggaatcaccaggtgagcaatgagcggatcagccgtggtcatacgactatggcagattctaactattgcttcatgaagaccgtcgagagagaccgggggctgccccggtcccggcaacccctcttcactaacagtggatgggggaggagggcctccaattataatgctcgtttcgttttttttttgttgagtttccaccggtttggtgttggcatgttcggtggagagtccctcgttggtggaagcccctggatctccggctagtactccggatattgatattcgcgatcggggtttctcgattccgagttgatcgtgggtttctaatattggattatcgggatctcgttggtttcgatgcattctggaagtatagcacgtagatagatgcaaggtgacaatatccagtggtactcgggagtgtagtgtatggctgataaccaggacttttgcccgggaattttgttttctctaaaaatgaaaccgaaaaattcggccacgagggattggccccgcggattgctccgttagttaagacccggttggcggatgctttccggtacgttatcgatgtctttcgatgctccggatactccgtacggagtgctccctagtattattggattgacggtgatgacatcaatgcaatcaaagctacggagtagatatcatatttatgatacatacataacttggaagtggttaacagcgctcgaaatgtacaagaaaaaacaagatcccgagttaaattagtatccagattcggactagtcaggggcactacaccaacttccctagggctaatgattcgaatcacgcctatcggaaggtggaaaagcttgtaggcggggctttcccaaacggctgtcaagcctaccggccaagacgcacctggggacgcgctaaagaagtttgctcctttttattttattctaggctttggggatgttcttcggttccacacagatcggatgaattcctaatatcaacagacccctatcataaatagttgctgggtcgagtggagatggacttggactctatcgtggcatctaccatggttcagctcttgctgctaacattgctgttgatccacaaccattactagttagttacatgtagtggtggtgatggtgtagaggatgtcggaaatccaacatacatagcctcatcagatgcagcgaatgccttgtcatgcacgctggtcctgcagagtcggaacattcatgagttcgttaggttttggcctatcttgtgtcattgttgtaccactggtaccttatattgtggctgaccattgtttttcaaagcaagtcatattttcaatatattgctctatgggcatagtgcagattaagatcgcgacgaactcccatgtatcttccaactttattgcatgttgtacggggtacgggagtatggcatgtctgattagtgggattactagagagttacaaccaatgaatttcccttgctgccggcttcctaagtaaggagtttcacattatacagtatgtatactgtgactcgatcctatttctcgattctgatatgagagattggacggatgaactactccggaccgtgaccaccttccacattcaaaatcctgctcccaaactgtgaaatgaagtaatggggcgacgatcttggtgtttcccgtgtccaggcccccgggaccccctagcgaatgggtgtttttcattgcttcattacggagtcccccgatgtcataagaacattggaaataacatcgcacacacaccaccgaattgcatgtttcgaaccagaattggccacatcgacatgtccaatctcgcagtcatcagggtggcgctcagccccaggttccacattccggaagcgagaccagaaggaagaggacagagggaaaaggaaagaagagggggatgtgatcctgaacattttatttttttatcttacgcaaggggggtgaaatggatgacggtaagtttgggcagtggctacctgatgttgagcggagtctacactggtcgcctaagtatccataccataccgtacctgcatcggaccatggatgcaggctcgggaagccccttggggcatggacagtgcaggcaatgcaggtctgctgaaacagtaaataaacagagaatatagatcgtatataacattctatatcgctaccgagagatccaaggaatataaccattagaataaagaacacgaacggtacttaattttgatccgctggtggacaccccatttgagacgatcatctagatcttatttttttttctcttggtaatatcgtatgccgctaagggccctggacagttacagttctggatccattccaaatctccccctcccatcgcattcttcgcgtcaatttccccagtcattctttcttttcgacctatttccttctcgacggactctgcagcatattgcgtcccgtttctctcatgctgtgatctgtcaatccccgctaattactctgattggtctggcacccggaccattcacggtacacggcgtgaactcggtattcctggcgcttcttctcttcaggggacgtctctctctccctgacctccatctgcacttgttgttgcacttgaaggtcatgccgctcatttcattctctggataaggacatccattgagtcactttgaccgcattgagccaacccgggacactgatcgtcgctgaagctactactacactctcggatttatcgacattcactcaacccaatcgtaaaattatcgaagcgcattcattcctttccaattacgaggtggcccctgagcacctcgagcatcccgatgatgaaccgattccgcaaacacaagaaggcgaaggaggtcgcggaggaagaagcgacatcgccaggattcagcctaaaatcatcgaagaagaaggtggtcgaaccggaacccaaactagatttcgacctatcagccgcactcccgccgacagacaacttccgcaccagtctgctaatgcccaagttgtccgctcgatttagcatgctcaaggaacaggacgacccactctcaatgctaggcaaggctagtgatgatagcgttctatttcccaagcgcgcttcccgactcaatttgttcggtcacaaccccgccatgctgacagacattgacgaagtttgctccaatgacggtagccgaccatcctttgcacttgaccgcacttctttcgcttccggtggggacggctatggtacggacgacgatcgatcccaaacgggcagtatgatgagcagagcccgtcgcgccgagggcaataatctgtttggaggtcgccaaaagatttataagattccggtcagatcgccagcggcaacaacccccgatacgcccgacgctggtcgctggggaatgggaaagccggtctatgagcatgacttgaacctatctgcgtttcagcgattgcgtctcaaggagaaggaagagagagcggaggccgcggctgcccgggaatctggatatgccgcctcaactgcttcatctaacagccgactcacatactcctccaccgcatctggaccactgtcaacagtcccaacatcaactgtaggaacctccgccgacgagtcaccgttgaccacgtcccaagccccagcgacgggctatccgttccccgaaaccctccctgaggactctcgacccggtcctggccccatgtctggcccgcgcaatggctcggttcggagccgtcgtctctacggacaaggattgacacaggctgttcagagccagcagagctcgactttgaaccgcctagagagtctgagtcgccagcgtgctggcactccagatattccctctttgaaccgtaacttctccaaaagtgccaccaacctaagggaccacctgaagcttgcgattgtcgagccggcttctaccacaggcccgactagccctcctccatctgcaacatcatcaaagccacgaatgtccggagaagccgggttcaaagaccatctctcgcctagcacagcaacgtttggggctcctcccctgagccctcccacaagcgagaacaacgacgttccctcactgttggctgcctcaattaacccagatgatcatggaaaggctaccgctatgggcttgttctaccggcctgccactggttttgacgagcaggcattctcccgccgccaacttcaaatgcaccaaggccgagagaccccgccccctcgccgcgcatcgcctccgcgccgacctctaccggctgaacccgtgggccgtgctcggggactgtcgaagtctagctatcgttccacagcagagtcggcctcatctcactatagcatcgatccttcctccagcgttgaggcttctcccttcagacctggagtgaggactttctatgctaactcaagtgccagcgagtctggtgatgacggagagagaccttcctcgcgtgaactgtcatctctggctagcgagtacggtccgccgcttcagcagtccagtgtgggatctaacaagccatcaacttccacaaaggatcatctcgaaacgcttcccgaagtgagatactccgacctaggtgatcttagacctattgacgaggacggccttgacttcacaatttcttcccccgtagtcagcgataacacacccaaacgacctgactcaccaaccctggaaccagatcaaggctttggtggaatggggggactggttcgatctcacctacgccaggaaagtgagatgtcttctatcttccctcctccttcacctcgctcgtcagagcaccaaaatgacaaacattttcctaagaccgggaccccccagccaccgaacggtcttcctacgataacacaaacccgtgatgaaagtcggtcatcatcaagaacccgcccaggaacatcgagctcgcgatctccttctggacattctgtcgaaggtgcaggttctcgaaacagcgcagggtcatccgcacctggaactattgctgacacacctttatcgaacggcccgtcctggagggaggaattagaacttcatcatcgccgtcatggcagcaccgagacccaaagggaacgagaggaattcgccatcgagctggcagagagacgtagaaaggtgcaggagaagctgcgtagtgtcgctgagaacgaaagccgatccagcagccccaacccgggccggtcaaccccagaattctcccgggctggtaacgcatttgccatgttgaagcaaaagtctagtaaacaagctagcacaaagccggatcagaagaagttgtttggttatgttggtggcaactcgtctacgcctgctctctcagatggctcgtggcgcgaagaggagcgaccctcttttagcttcggccagcaccccaactccagctctccccacattggatcagagcgttcgatccgttctcgtatgccatctatcagccgcgacaacagctacgaagaatcacgcgagtcaagccgcagccgtggggagccnnnnnnnnnnnnnnnnnnnnnnnnnnnnnnnnnnnnnnnnnnnnnnnnnnnnnnnnnnnnnnnnnnnnnnnnnnnnnnnnnnnnnnnnnnnnnnnnnnnnnnnnnnnnnnnnnnnnnnnnnnnnnnnnnnnnnnnnnnnnnnnnnnnnnnnnnnnnnnnnnnnnnnnnnnnnnnnnnnnnnnnnnnnnnnnnnnnnnnnnnnnnnnnnnnnnnnncaagccgcagccgtggcgactcgcctttccgagaccgtgcaggctcggatgcatcaggccggtctaagagtcgaacaagacttcgggatgatcttcaaactgtgaacgagggtccaatcgagaaaggctctgagcctcctctgcccgtctcgcgtccgacatcgagtcgcccatcagcagaaatatccgaccctatgagtttcgaacgcacttcctctgttgcttcgggcagacaccgcagtagcagccgatccggcacaccaagctaccaatatgaacggcccttccagttctcgtccaacacgtcctcaatcatcggcgcctcgcctcgggccccacccgccgcgccgggctactctgccaatgcgactcctccgctgaacgaaatgccaacagacggctcgtctacatccctggcttcttcgtccagcggctcgcagaattctcaacgcgctttgggatctgcgtccctcaccaagcgccccgtgaacaaaaggctgatttccgagcctacctttctctcatccacagcaagtgtccctctcgtcggtctcccacccggatccgcgctgccttcacccgtcagcgcacccccagtgccacctatgaacccccgccgtcgccgtggaaccgccacccaaaccatcttgggtgcgttcaagatcgacaagaccgattcttcacgtgtctcgtccccggccccgagcgccgaggacgaacacagtgtcttcccagatgatgagaaacgcccgcgctctcgaaaccgtctccgcaagacttccagcgagggcggtaacctgaatgcgcgcgcgcgccaggaatccatggcggacatcccgccggctgttcctcaatatccgcctcccgctatccccgccgagggaggcatgttctaaacacaacgtcccttcccatcccatcctgtacacattcaccctcccttgacctaggctctctttattcctttgtcctctgtcttctcatttacctacatctactctacctatcactccctccaaaccccccttttccgggccttttcttctcttatctggactgtcttgtcatttctgctgttgacgactagataccactcggtgcatttgagcgtctcatgtctactttcgatcttttccttctttcctttgtgttatacacacctttgagctggattttcatcttccacgtatgtactttattttcgaattcatggatacactactcgatacactggatattatggtctcgtaagctctgttactcgtagcttcaggttgaacaaggctatattgcatactctctaacacgcctcattcaagccccggccactacacagtaaattggataatgtggacgtattcccgtagattcgattataggacgatcaagcattgatcttattgcgcgcgcttggaaagcatcttaaatggtatataattgcttttaatatagtatcatacattttcattgaaattagttcaagatctatccaccgccgtcttgaggtatcccaagaccctctcaacaagccacttccgcgcctcagcttggtcatcattactcaaagcatgagaagcattagggataacgccagtgtgcgtttgatcccaaatctgatatttgccatcatggtccgtagccttctgccacctcgccagcatcttgttcttatccacataatcaggaaccgactgatccttcccagagatcaataccatcagcttatgattcaacagtgcctgctcttgaatccgaccaaaggtagtcaaaaagtggtcatcgctgagatccgagctgaacagatcatcctcctgcggcgactgcggactctcaggactaaccagactcaagaatctgcgacagctaatcggcgtattggcaggataaatcatagaagtcaactccagaggaaggatagtatcatggggcttgccctcggcaacagccgccttggccagcgcctccatctcatcatataccgcacgtgccttctcaggcgtcgtatctccaatgccccacttcaacacgcagaagatagcctcgcggtccgaaacgggcgcttgcatgatcgcgccgtccagcacgggccgcttgatgtgttcgatctccgggtcgaaggccgggatcttggtgtgcgggtttggcttggagaggtagtgcagcacgcactggctgcccgtggaatggcccatcagggcgatcttgccgccgccgaatttgtcgcctttgtagcttttgatgtattccagacactgggcgatctcgtccgtgtcgcggtcgagatggccgaggccccaggattggtaggaggatgtgaggttgagggtgaagagggaccattcggtttgctgtagggagtgggcgagatcggccatgtaggatgttgttgcgaggccatcgccgagtccgccgacgaagaggagactgtgcggttggcggacggtgctggaggtggattcgaatgtgacgagggtttcggtctacatggtttcaattgttagttgtagtcccaattgttattgttgacagcggtgcgggaacatacgtagtggtgcaggataccgggaaggcctcctttgggccagaacttggacatgttggcgtgtgtgtgtgtaaatgtgtgtagtgggggtagtgtcagttgaagggaaaactattctaaaagctagagagggcgacctccgggacaggatcttttctttaatgagccaattgccgagatcgggctctatgtctctccggcatgacggaatgtggacaattttgtgtcggttagcttggaccgaataacgcgatccacaaggtgaacggtttcaggccatcttatcaatctgattataccgaggcaagccgagatattaggtaacaaatctcacatccatggaatgttcagtgccaaggtccaacgttggaagttaggggaaatgcgggaaactgcagactttttgaggaaattatatcgatgtcttgaatcaggtacatgtatttcaaggtacccgttcaggtaatactctgtattggaaaacaacgggctgttacgtattggatacggcgggatgtatttcgtcatcacggtaaatacagcaattcaagctcgattacgcctgttacggctagtaattatacaaagctttgcacgggaagtgagatggccaatgaaactccaccgttgaaacgacacatgcagactagtcggcactagcctgtataggcaggatcgacggatctgattagattgattggctgaaaacaggagaatctgattagattgcccctctttgaaaactctacccaacgtgcaggttcggccgaacgttcgtcagcatctgatcagcatgtgcatctcaacacaagacttttctgaaatgcttaggaagtcttggtcagccttgccaggctcattcgaagatctttgcctgaagaggttgtcgtcgtgtataatattattcattcggattcgaatgtagacattgtgcaaaaataagattaaagtatatgcgtagcttttatcagaccacgaaattaatatagacaagtggatggctactttgtggcgtttgcaagaaatccatttaaacttgtctacaagcgagccaagaaatcaacgtaaggaacgtgcgcgacagagtgaggcctttatcaaattttctttttaatattccacgcttattgcgcgaggtccaagcggatattgacttattattatgtactattgttcaatgtattcggatgattctatgctagtacattgcgagaagtgtacacgactggtacacgacacacatgtgcgtgtgatttttcaaggtgggtctcggaatgcaagaatatcgaaaatccccttcctcgttcttcgcttccatcgggcttttccgcttgacacgcacaatcgtggatcccctaagcaattggcctccgagacctcggagaaccattctttttcagtttggagtgccttgatgtgtttcagaataggacgatcatattcaggctgactgcaacatctgttattttaatttatgtcttgatggtgagcaatatcctaactggggtcttccgtaaccaatcttggcgtagcatttccttttttccctcgtttttcccttctttcctcttgtgtggagtctgtggacccgatacgtcctgtatcatacagtattgtatgcagctttgagatctgaaatcacatacgacatacacgtatgggtccaaaatgctcaggaaagatgaaacggccacatgcttcggctttcatactgccttccagaacgggcgtgaataatccactcaccccgcaatagccgatctcggtgatgatatgcaaaatacatgcagggcacattcaggatatcttcggagctttcaagccttgaggtggagctgatgcagaaccgtgtctagttggctatatagtgacacacttccgtcaaattaatccgcgcaaaggctcccgatctaacaatcaagctcccaatcccttcacataaactcgagggtaccaagaccagctgcgctggtcagccgtcaaaatgggcttcatacctctcgaagatgccaatattcgcaatgcgccaaatggaattgagaaagtgccaacagacgtcaatggcgactttagctcattccacattgcggatcttgcctctgaacaaatcatcactccgaccggcatgaaggaagagatcgtgctgttgtcctggctcattgtgttgttgcgcagccgggaagacagccaaatatcatacgactggtcctacaaatattccgcaaatggcgctgagcccgagtcagtgaacaaaatattgatgaatgaagtaatgaaaggattacaaagtaatgtgggagaagttgcgactgcgatctctcggaatatcaccgcgggagcgtccagtgacgcatcgctcgttttgagtaccagctctctttcgcgaacatcggaagaagccaaagatgaagtaagtgaacgattaaaaccatagccactgaattataactaaccgtaattgaaaagggtatgcttcatctcgaagttcggttcgataatgcccacctcgagatccgcccattgtggcacaccgagaacatgttgccgtacacagtgaagcaccatgtcgaggcacttgccgacactgtcagagtatgcctcggaaatcccgatgcgacaattgaacaatgtcttcgcccgactgaaagtgatctgaacgatatatgggggtggaaccacgaattgcctcccacctacagattttgtatgcaagatatggtcgctgaaagagctcgcgaatacccagacaaagtcgccattgattcctgggatggcagcttgacctatagccaaattgatcagtggtccacttccgtagcgtgctcgctcaaagaaatgggcgttgagctgcacgatgtcctccccgtgtgctttgagaaatccaggtggacgatcgtcgctgtgcttggagtgatgaaagcaggcgcaactcttgcgctcatggatccaacacttccgcttgcccgtcttcaaaacatggctgtacaggtcggcgcaaagtccatggtttcatcccgcatgcagtatgagctgtcgctggagatcatgcccactggaaaccacttcgtcgttgaagaagacgctttcacaaatccagcaaagtccccatcaatttccgacttacccgatgtaccatcctccgccctcatgtacatcatcttcacctctggcagcacgggcactccgaagggagtgaagatttcccaccaaacttacacgagtagtgcaatccctcgagcaaaggcagttggatacacgccagagtccagggtgcttgatttcgcatcctatgctttcgatgtcagcatcgacagtatgcttttaacactcggaaacggtggttgtctttgcattccatccgacgaggatcgactgaatgatatcaacgaagttatccgcaaaatgcgaattaactacgcaggcctgaccccctcagtgggccgaattttggacgcggatgtcatcgcatcgctcagcggcctcggtctcggaggtgaagctgtctcggcaagagacgccaaccactggggcaaagaaaccagaatcattattggttacggtccctgcgaatgcaccattggatgcacagtcaatgccagcgctgctaccggccgagattatctctccattggcccaggcaacggcgcagccatgtggattgccaacccgaatgaccacaacgagcttgtgccagtcggcgctgtgggcgagctgctcgttgagggaccgattgtcgggcagggctatctcaatgaccccgagaagactgctgcttctttcattaatgatccaccttggttggttgcaggccacaaaaactaccctggtcgtcggggccgtctgtacaagactggagatcttggaagatatgatcccgatggtcttggtggtatcgttttcgttggacgaaaggacactcaagtcaaactgcgcggacaacgtgtcgaattgggagaaatcgagagtcagctaaaggctgttctgccttcagaagctaatgtcattgctgaagtgattacccccaaggattatggaggtcagccaatgctcgtcgcgttcgttgccttccaaccaaagggacatggacaggccgagcttgccttggatgacatctcaagcgaattaagtagcgtattgacaaaggccaatgcggacgtggcgaagactttgccacgttacatggtgccaaccacatatatcccggttaatcttatgccggtgttgatttcaggcaaaactgatcgcaagcaactccgagcatttggtgcgacagttgatctgcgccagctagaccaaggagctgcaagcaccgcttcccgggaactgaatgagcttgagaagcgcctgcgacaggcctgggccgaaacactcaaactcgatgcagaagccattcgccccgatgataacttcttcgccctgggtggtgactccttggcagcgatgagactcgtgtctgtctgcagagcgcaagatctcgacctttctgtcatcagcactttcggaaaccctaccctctcggcgatggccactgtcgttcagccttgcagctctcatgtacaggaagatatcccggcattctctttaatctcccaatctgttgagagtgctcgcctcgaagcagcacaagcttgtggggtggatcaagaagacgtggaagatatctacctttgcacacccacacaggagtcactgttcaccttctcgctcaaatcgacaaaggcgtacgttgctcaaagagtcgcatgtattccgtcggatatcaccctggatgcttggaagaaggcctgggaagatgttgttgcagcaagccctatcctgcgatctcgtctggcaccgcttcaagacccaggtctccagcaaattgttgtgaaggaaggcatctcctggagatactccacagatctgaaccaatatctcgagaacgaccgaagcgagaagatgaaccttggacaaagtctggctcgatacggccttgtcagcaacgagaatgatgacaagcggtatatgatctggactgtccaccacgttctctacgacggatggtcagagccaatcgttctcaagcaggtcagcgatgccttgcagaaccgttctgtcgcgatcccgacacagatgcgggattttgtcaagtacgtacgcgatacagacgagactgccatgcatgacttctggcgacgggagttgaagggtgctgtcgggcctcagttcccccgcctgccctctcgtgactacatgcccactcccaattccatgatcgaacatcagatttccctcgagacagttgctggatcgcctttcacgatggccacattggtccgcggtgcatgggccctcgtcgcctcccaatacactggaagcgacgatgtcgtgtttggtgagacactcactggccgtgatatttcgctaccgggtgtggagagcatcgtcggaccactgatcgcaacaattcccattcgcatccaggtccgccgatccaactcagtcgaatcctacttgcagacagtacaacaaactatcgtggctcgcacaccctatcagcatatgggaatgcagaacatcagaaaggtcagccaagacgcgcagtatgcatgcgaagctggcaccggactggtcatccagcccgatcccgagtacgtgggtagcgagcttggatttgagcttggcgatgttgtccgcgaggcgcttcacttcaacccgtacccactcatggtggcctttggaatcaacaagggtggcctcagagtttccgccagtttcgatagcagcctgattgagagttcgcagatgcaacggattctcgcacagttggaaaccgcttgcgtgcagttgtctaagggtattgacaagcgcattgatgaaatctcttgccttcccgagactgaattgaatcaaatttggcaatggaaccagactcctcctcttttcgttgacgaaacctctggcaaccttcgcgcccatgcgagcaccaaacagggatcagtctatcctcgtactgtggttccttgggtttgtgatgctcgcaacccggatctgttgtcgcctattggcagtgttggagagctctggcttgagggagcctgcctttctggggaaacagtcgaatcacctgcctggcttgtggctggaagctctgaacacgctggccgatcaggaaaggtgcagcctacgggtgacatggtccagctcagagatgatggaagtctggtatttgttggccgcaaggagaatgttgtaccccttcaaggacacgcggtggatattgcagacctcgagtcgcatttcgcagctcacctcccatccggaactcgggcagctgcatcggtgttccagccgttgagagaaggcactcaaaaagcgtccgagcaagagctggctgtcttcatcgagaatcagccttctcaggaagacagtgtaagagtgatgccggcgaaatacgagatagtgggcgatgagacgactgtatgcgacactattcccgttacacttgctgtgtcattgaagaagctcgacaaatttatccgtgactcattgccatcctacatggccccatctgcgtacgtcgtggttgacaagttacccgctggactggagcaactcgaccacacctcactcaaccaattggcatcgaagattcctcgaaacgtcttcgaagatctccgtggaggcttcaaagaggcatggacaaagggcttagcgcagacaaccctatcgcccacagagaagatcctgcaatccgcttgggccaagatcctccgattgagtcccgagcagattgacgtcgatgacaacttcttccgccttggaggcgactctgtcttggcaatgaaattggtgtcaagtctccgcacacagggacacagcttatcagtggccgatatcttccaacacatgcgtcttggtgatgcagccaaggtgctgaaggtggaccaagcgaaggaagccgctccgctatacaagcctttctccgcgctgaacaatctggatgtcaagatgttcttggcctcaactgtccggcccaagcttgccaacccaggctggcccatcaaggatgtgttctcgatcacagattcgcaagcactcgatattagaggaactattggagcaccacgcacttccatccaatacaccatgctgtacttcgaccaaaatatcgatcgcgagaagttgattagcgcctgcaatgacctggtcaagacccacgatattctgcgcactgtcttcattgagcatgaatcgtccttccttcaagttgtccttgaagacggacatgtccccgtgatcatgcgccaggctgacaaggatattgagcaatacgtcaccgacctctgcacaacagacatcgagtcaaacttcgaacttggatcgccattcctcaagatcttccatgtccaaggcaccgacggaaagcactgtctcgtgctaggcctttcgcacgcccaatatgatggcgtctcactccccagactgcttcaagacctggagaccctatatgccggagacaaggttgtggactttgagccattcgcctcatacatggcacgagttaccgatggacgcctccaaactaaggcaatcagctactggggcaagctgctcaaggattcgacactgtctgtcctcgatggagcctcggcccagtccacagacaaatccatcttccacgagaaggccgtcgaagaattccagcccgtgccggagatcacgacggcgaacgtgctcactgcagcatgggcactggtactggcccgtcgtctgggcaaacccgatgtgacattcggcacggtcacctcaggccgaacgatcgacctagcaaacgtggagaatgtcatgggtccatgctaccaactcactcctgtcagagtgaagttcgagtcgcagtggacagcgatagatctattgcgctttgtgcagcagcagagtgccgagtctgcggcgcacgatttcctcgggttcgagaagatctcgaagctgtgcgcacactggtcatcggaggtacactcctttgactcgattgttcatcaccaggactgggatgatttcgatgatatgccatttgctggatcttcttgcaaggttgatatttccaacccacatggcgatgctgcttatcccttgaaggctgtctcgttcgtgcgcggtgggaagatgcatgttggatttgttggaagtgaaaaggatgtgacttttgtggatgccacgcttgatgagttagctgctgctgttcaggagttgtcgggctgtcgctctgatcccctggttcttggtgcctgaatatgatagatgatatatgatatttttgtaaagcagatagattgagatgatttgaaatttgattgaatgtttttcttatatttcacgtgtcttttctacaaacctaaaggacctagatactcaaacctttggtttatggcttcatatcgtgccttgtatctctttttttccattgcagtgggaatcctcaaattgtggccctattttccaggtagggagaaaatctcgaataatcccagagagaagagagcccagtcaccactcacagaatgaaaaggagcttacaggatgttgctacattaggagataagaatgtctactacggtctgagtgatctccatgcttgctagctgacctcgctggatggtgttgttgtgtcgcactcgtggccagactgcccatcgtgcatatccttcttcaatatatatcttttgaatacgaaaagatgccggccatttctactagtaatagatcataaaaacactggtaaaataataataataataataatagggatatatattaaacaagtactagaaatttaaatcggacatatacttttcaagtcgccactgtctggtgcatgacattcgcccggtaactgtcggaccgcaggagcaattcttcatgagagccagagtcagtgcatacaccaccatcgatcaagaaaatggtatcagccttccggatagtgtgaagacggtgagcaatggcgatgacagtgattccccgtgcggccttttccagaccatcctgcaagagcttctcggattcagcgtccaaagcactagtcgattcatcaagaatgagaagcttgggcttgcgaacgagagcacgagcgatggacaatctctgcttctggcctcccgagaactggttaccactcggtccacagagcgtctggtagccatttggcaatgcagcgataacatcgtggatgtttgcgagcttacaggcctcttgaatttcttcaagggtcactttgtggttgggtcgggcaccgagaccaacattgaactcaatgcttccttcgaagaggacgctctcttgaggcacaagagaaatccagtcacggaaggtgacatccgaggtcttggtcacgtcaactccgtcgattatgatagagccagattcgggtttgtacaggcgctcaaccagggagatgatggtcgatttaccggcaccactgggtccaacgagggcacagaacttgccggggcgaatatcaatgttcaagcccttcagaatcttcatgtccggccgggcagggtaagagaagtgaacatcgcgcatctgcacactcgaagccgtgctgcccgagttgtaggtgggtttctcttcagttgcctcgacatccatggtgtatggattgagccggccacccatcttgtccttgccgatctcaatcaggccaaggattctggacattgccgatcgcgcggcagaaagctcaggtgcgagtgcgaacatctgactccaaagcagggcactgactaggagagagaagacgacaatcaggaactgggtctgactgtagttgccgttgatgatctgcttggaaccccaccagtatgccagtgcatttaccatgttacctaggaagtaggtcatggcttgccagaaacttgcctgcacggtgaccataaatgtctccttgcggggtcctttcagggatcgtcggtaggtccttaaagtattctcttcaagagaaagagaggcgattgtcttgatagaggtaactgcttccacaccgatgtcgacagacttggtgtaagcgttttcatgacgctcctcgaatttgccgaggaccatgagctccattagaccagctccaagcagaaggggtacaagggccaggcagaccaaggcaattctccaggcaataatgtgggtcagaataatggcggcaatgaggttgacggtgatagagaacagggtgccaacgacagatccgctaataccggcaagggcattaccatctctggtaatataggacagaagtagagcaggcgaccggccgttagactgatgccactggagatcttgttcaaacagtgaccggaatgacaacactcgcaccttatagacgatcttctcagagacaaggccgaatcctccccagctgacgatatttgcaaagaactcgatgatcgcaagaacgaagaacatcagaccgtagaagttaccccgtgagctgatgctgtctgcagtgtgacaagggttgagacttccgaccgtgtttccgaaaatgacggcttcgccagagaaggctccgccaaccatgctggaaccgaaaagagcagcaaaaatgacaagcgtatggggcttgagagctggagcataacccttgcaaagaccccagacggatctgacggggccctgaaggtctctattttgttcctcttcctcatcggagtcaccggctggtgcttcagtggttgagacacgggtttcctttgtaggttcatggtcatgtgaaagaccgcccttttcattttccatgtcggtaatagaggtagcatcggacttgctgacgctctcaatgctggcagtggtatcagtcttggatccagccgcagctccgagagtctgcaatttaaccagctcagagtaaggcccattcgcagccatcaactcggcgtgagttccctcttccaagatatctcccttgtgcatacagacaatcttatccgcatttgtgatcgttgacagacgatgagcaatcgtgataacagttcgaccggttgagatgttgttgatagcccgttggatacgctgttcactgcgtgaatccagagcagctgtggcttcgtccaaaatgagaaccgcaggatccttgacaagggcacgcgcaagagagactcgttgcttctgaccaccactgatgagtcgaccactagagccaaccatcgtggcgtacccatactgcaatgcttcgataaagccatctgcatcggcaagcgcggcagcatgtcggaccaattgaacgatttcgacgatttctgggccccgtctctctgctgcggtcataagatcttcaccctctctgacttcggtggctagatcaccgaggtccgttgaaaggagtgccatcttcaggtgtgcatgggctggtttgcttgagttcatcaagccgtgtgcgatgttctccaaaagggatcggtcgagaagggaaggctcctgctgcacaagactgaggaatcctctcaagtcacgggtattgacatcgcggatattgtggccatcgaaagtgatctcacctcccgtggcatcatacaagcggataaccaaacctgcgatggtggactttccacttccagaaaggccaacaatggcagtgtgcttcttgggagcaatagagagattgatcttgttaaggacagtgatctcgggcctggaggggtaaatgaaagagacgtccttcaattcaaatccaccctccgcctcggtgaggcgaatgccctcatcggagtgtccatcaatcaaggatacacgatcaatatcgcttcgcagcttgtggtaacaggcaacagcctgtgtaaacaggtggataaaaggtgcaacttgactcagaagcagggtagctatcgttaatgttagtaaaatatttcacaccaagatatctattaaactgaccttcgaccaagacaaagataaccgtgaaaatagctccgacagtggctcccgcagactcgcggcgcactgctgcggcgatctgtttacttccttgccagaatgcaagaccgtttgcaccatatgagacgaaatacaagacaccggcttgaataccagtggcagacgcctttttcaatccttcggtttccgagtcctttaacgccttggagaacttctcctctagacgagcgttggcaccaaatgcatgcaccacaacaatgttgttcagcgcttcggaggcaatcgacgcagcggaagcagcataatccgacatgcgcccggtgtatttctcgatataataacttccaacaaatgacataatgaagtatgcggggatcaaggacagtagcatcgcggcaagaatagagtctttgataaatgccacgacgtatgcggtgacgaaaaaggagaaactcgagatacagattccgaccttctcagctgtaccggagcgaatggtttggatatcggtattgagtcgagaagcaacttctccggccggcaggttatcaaagaaagagggttcttgtcggagcaggttctggagatacttttcgcggagtcgctgcgccaggcgcgcaccggtcatcgtccagcatagtaggtgaaggtagattaaaacgaattgagcaatgcccaggtacacgatcagcagaattctgctattgatgtccgcttgatcgctggagtccccttgctcgccagcagcttcggcacaggtcaccgaattgaaatcatcgataagttgaccgaatacgataccaatgatggggaaagggacacccgatccaattgcagacgccaggccaacaaagagggttaccaattcgagtcgtgagggattggcagccacaagcagccgagggtagtctgcaaggttcccgaaacccatggtgactcgagaatggcgttcaacactgggattgtcgtttgagtgttgaagaagctaagttcttacaggcgatcaatttatcgctttgcagttttaaaagtggcgtcaccatgaaaattgcacccacttcttagcgtgagtccattcggcgaaactactttagctgggttgcgacaaagacccaaggaaagatgtatgccaagtgtaaagatggggattccaggggatttccggatgtttaacctgccgatttgattttttccactctgccgacatcggttttgacagttggatccgaagatgcaacccacaaggggggcacctgaagaatttcaattatacggacgggggttatcagatcaaaatgggggtttgagtaccgtggttacccttactgccgtccgtacgtgtaagtctgggtcaatacggctatactgtatctataaatcccaagtgtccgtattttacatccggaaaaaatacactatgtatttaataaaacaaagtggagagacggtaattaatacggtacctcaaactctgtcttagagctagcaggacgtcctattggctgatatcttgttaaatatccgaaaagcatattccatcagaatacgtgtagtataacacaatatcattattattcgaacgtacagaaagacaacaaagcccagtgggtcctgtcacatcatcctatctttttaaaaaagcccagaagattatctgattgattggggcaaagcggagtgcataacgcgtttctagggggaactgcctgaacaaggaagctcgaggtggagaacacgagctacccccacttgtctcggaaagatgatggaaatgaattaaaaataaaagaatatctcctgaaattttatacattgcacaatgttaagcttcgccgatcagagtcaagtatgagtcaagaaagctcaagcaaatttacaatttcgcattccacgcggcgcgatcagcggattctaaaggtcgctcacgtccgtcccagaatagtggacacaactggaaccatttttcgcgactgcaaatcgaatggaccgatcgcttatggccgagatcgacgtacttgccaattgtgagtccttgcgcgttctcgtaggacaagatggtcgccccggtggccttgggctcaccgacagcattagcggtcctgggatcgtccaagaaaacatagtggatacagctcgagtaccaggcatttacgcggtgtgcacctcggaagctggcatcgccgacaagagagtgacggcctcggtcatagtctccagcatcgtagtaggcgccatagtgatcctcctgtagacaaggtgttagtgtcaatgccagcctaaagcttgacggagtcgggggatttacctttgaccagtacaactcataatacgaaaagcgggtatcatcgaagcgtccgaacaagcacagaacatggggatcgaagtgcagtttgcgcagatactcggtgtgctgttcaataattccagtctcattccagcctgcggcaacacgcgggtcattttgccacttgttgaacagctggacgtgttccgcattttgccagtcaacgacttcgagcgagaagtgctcgttgatctcagggatgtagcgactgtaggcaattgatccggggaacggcttagggcggcgagtcgggtggcgggtatatacaggctcctcggggaacttgtttgtcatttggtagttctccggcatgatgggatactgagacaagggctcccgcatggggccgtctgtgccatctcccaccacccagataggacgagggcccaatggagaagcagcaccctgccagaaggcgcttcggagaatcagcaaatcatcgaattgcagagccttgttttctctgtcccgcaggttccgcgggtggtcgattgccaacccggtggtaagaagctcattgcggatgacttcttgccctgtgccggacagggtcagtctgaagtactcgattgttgggtgaccaagataaatggcgtgaacaacgttccaaatttggcccaaagaaggggtgctgttccctgaccactggaaaacagtctggggactgcgacgcgcgcgaccccagggactgttatctgagataggtggttgctcggctttgggaatgaatgtcaagtcaagccatgagagcgagtctgagtgtagctgttcaggcaaaggccggccctttgcgggctgctcgtcaagtgtcaaggtgcgcgtagccggtgtcgatccattgactgtgttcacacgatatgcggtcaggtaagggtgtggtagcttgaccaaaggatactggtgtgatttggaggccattgtcgtagtttctcgatcgtcaaaggtagggatcaagaattccgaaggagttggagtgtcggtgtaagaaaaaaaaaaaaagagagctccccgcgctgcgcaatcagattatatgtatggagtaggtgagaccctcaaacggctgaagaatatcaattaaggagatagtaaccgaggccgaattctctcacatatgtaacgaatggtttcgggatacacgagcctgaatttatcaccctatggggctgttattttcaaacatgtacaataatatatctgtacgttgtacggagataataccgatgtcgtcttgttatggagccaactcccgaggttccgtggaagctttctgcgcccgagctctacgaatgacaatacataatccgtagcccagcccaagagaaaatataaagtcgaagtctaaggttgaattagtcacaatactgtgcatattctgcttcacaattcatcatgtcgttacgatcagggcccttgaatcatgagaatttctatatctctttcccgcatgagcggattgtccaggtcacaatcaatagaccggacaagctaaattgcatcgacaagaagactagtcgagagattgccaagatctgggagcagttcgatgaagatgaaagcttatgggtcgccatcatcaccggtgttgggagagccttctgcacaggcgcagatctaggaggtgggtttcttctttctatcacctgaactatcgactgacggaatcgagcagagtggaacgcaatgaacaaggcaggcgtcgtcaatgacatgtccgctcctggcctggccggattgcctcgccggaccggcaagaaaccgatcatcgccgcagtgaacggcctctgcatgggcggagggttcgagatggtggcgaattgcgatcttatcttagcctcatcatcggccattttctcccttcccgaagtgaagcgaggcatcgtgccagtagccggatgtttaccgcgattgacccgcactattggcctacaacgcaccatggatctcgtgcttactggcaggaacgtgagcgccaccacgctacatgactggggtcttatcagtcaagtggtggagccaccagccgacgttgtccgagcagcaattgaagttgctgaggtcatgtgcaagaatagccctgattccctcattgttggccgtctaggtgttcgaatgagctgggaagctggcagcgtggaggatactgtaacagatctcgcggatcactggtatcctcggttggttgggggtcctaactttgccgaaggcatccaggcttttgtggagaaacgatcaccaagctggaagaattcaaaactgtgagaggaaaaaagtccacccacactacaccgtaatcagatttggtggcgcaaccattttccacagtccgatggcggtgccatggttgatagtggagtgtgtacttatctgatttaactgtaacgcgacgtatttaattaatttcttttttttggaatgtttgggtcaaaataaactgcacgtggtaagcaccttaaaccagaggaagagggatgtatgcattgaagaagatatgtaggaaataactaaagatattttcatagatctgctattaattccaagagtcttggaaatcgtggaaatctcatgcgtgtttcatcgaactccgtttaataccatctcactgtattaaataccgctagtacctagttagtacggagtacatatattgttctccgtactatgtacccactgataccttctacattgtatgatgagtacatatgaccgggtgaatccgcacggatctcgcgtctttagtaagtagcttttagtgctgacccatgacgccccaaacacattgacccattattgtcattccttattaatataggatttttttcttatatctttttccggctgtcggcgtgacaattccattctgcatgccaagcaatgccaaggtatggattaccgcaacaggaagcttccgcgaggtacttgagcttcaagcagttacatccccggttaacattgccctcgcttcgtctctccggtatgagattcatcattcatgcaatcttattagcttctacctttggaaagtcccatcatggctgacgccgtcagtggggtgactagacatggcctgcatacgaccatacgcaaagaagccctagggaggagaggagggaaaaaatacagtttgttcgattattactccgtagcgaatgaacgctaagacatcgccaagacatttcctactggttcatttcacacggcgtgcattagccttccaagattgtaccaatccgccgagttcggtatttttttttaagcgctggatctggagcaccaataaccagggattatatttgctataagggcaaggattcccatgcgcttttgggttcctccaacctactttttatatttcctgatctccagatcaacatgggtgtttccaggttccgatctgccttccggcgatcatcgacccaggactctgttactcaaatccctgtgaccactgatggcgatgaaaagagcaaaatccctaccgaccccgttgctgtacccaacagcgcggaccccgaagttcccactcaagatgcacagcaaggtgtcagggatgtcgaggctgtgactttgagttggacgaggaccatgctgattgcagtctttgcaaagtaagcttttgttccctcgcctcgacgggcgatcgacccgtaaaaaccagcttatttactaacgtgaatcttcaatagcatctggttcttgtacttcgtcaatgctatgcaatcctcgattaactacagtttgctcagctatgtcaccagtgactttgagagtcattccctcctgaatgtcatctacattgttgcagacgccatgacagcctcagtgtacatccccactgccaagatcatggacgtttggggccgtgcagagggtttcctggtcatgaccgtttttgctacgcttggtctaattctcatggctgtatgccacaaccttcccacattctgcgcggcctacgtcttctacagcattggattcggaggtatgacatactgtgtcgatgtcatcaccgccgacatttccaagctcaagaatcgaggtttggcttacgctttcacctcctcgccatacatcatcacagccttcgctggtcccaaggccgccgagggcttctacgaagacattagctggcgatgggcctttggtgcattctccatcatcttccctattgttgcctcccctctttacttcatcttgaagagcaacctcaagaaggcccagaagaacggtcttctagtcccggagcctagcggccggaattggtggcaaagcatttggcactataccaaagagttcgattgtgagtgaagagcttttcaaagcattggaaaattgggaatactgacttgaatagtgcttggtgttttggtgttctctaccggccttacaatcttcctccttccgttcagcattgcaacgtacgcccctaagggctgggcatcaggctacatcattgctatgatcgtcatcggatttgttatgcttggcctcttccttgtttgggagttccgctttgctccgacaccaatgttcaacttcagactgttgaccgatcgaaccatcattggtgcatgcttgctcgacgcgacataccagctctcttactactgctggaacaactactatacatcctttttgcaggtagtcaacgatctcaccatctccgaggccggttatgttagcaacactttcgacgttgtctccggcttcctcttgcttggagtcggtttcattattcgcaagactggtcgctttaagtggactctctacattggtgtcccgctttacatcttcgcccagggattgatgatctatttccgccagcccgaccaatctgtcggttatcttgtgatgtgtcagattttcatctccattggtggatctgtcttcatcattgtcgagcagcttgccatcttagctgccgccgatcaccagcacgtcgcaactgtcctcgcccttctgaacgtcgtcggtaccgtgggtgatgctgccggttctaccatttgtgccgcaatctggaccaacaccttctacaaagcccttgaggcgaggcttcctgcctctgcgataggagacatcgatttgatctacgaggatattacccagcagctgtcctatcccgtcggaacccccgcgagaagggctattcaatcagcctatgcctattctcagacacgaatgcttgctgttggcaccggtctcatgggtctttgcatcatctgggccatcatgatccgcgacattgacctcaagaaggttgctcaggtcaagggtgtcgtcttctaaggtgtttcccttcttctttggagataattttcgacaatgataatgttgatgatccatttcccattatatccaaaccacgactagctgctcccaggcagttatcaaccttcgctttttgtaccttactatttaatcatatcaacatgacggtctgaatgcagagtgttatgactatccgaaacaacgtttctattcttgtaaatacttggcaatgatattgccccgagttttccgcgacctgtagctcgcttggtgtttgtttccgtttaccgggagagccgcggtatggtatgatatggtttggtatgtaataaaataaaattggcactttaaataagttatgcaaatataccgctagtaagtatgtaagtaatctatgtatcaaagtatgaaacaaaaactgtctgcatgtgctttcaagtgaatcttgtgaaattcgagcaatacacaaccataattatgttgagtagcagcttgcagagcccggtgtcatctgacagatccacgtatgactaaagtcatccattcccgaggtccatggtggaaccagggaatatgtaaaaagatctgataagtttcttttccaacgcccttgccgtttttgtacggcactacccctttcctttcggctcaaaccaccctgctgagacgtggctgaggacctcgaaagttacctatcatttcaattagcgaagtaataatagcagctgggattagattgatatcttgggaacatttctcttacaacatgcggagtacaagccgaagttctaccacgttgctaagtgggtatggccgcgttctgaggcgcagccggatgttcggttacaatcttcctggaaatattccgaatggtatggaatctgatgattttatctgatcatctgattagattgggctactggttcgggttctcttggcacttttatctgatcccaaggcgttcggtaggcacgaccgccaagaagcagcccatggtcttctgtggatgtccgggttcggcggacttcatctcgcactatttccctcccattacgtacttcaaaagtagcaacctagtggcgtggccttgactgcttgacagaaaaccttgccaaatgactcacggcttgaatcccaaaggtgtgacatgaggtgcaagtgtgaccaagacttgagggcttcgaggtcacgtgtgacagccacatggtacatcatctagagagagaaagactgcatacccaacgcaggttggcaaacaagtccattaaacctccacttcttcccatatcttgtgtcctttctcccgttttgggattttccagaatggccctgttggaaggtcagatcacatgaccttcattgttcgctcctgctacatagtcttctacaagccttagatagttctttctccacgcagctgagtttttcagtaatgatcaagatgcgctcctccacgccatgaacctttccccagctgagacagttatcatataattattacatgacaccttatgcaagaagcctctatagtatattgcatggatgcagcattaactacctaaatttattcccttcttactcggaaaaccccaccgatggccacatcaattcatttgtggaatatgaaagtttgatccgcgagatgtaggatttgtaaagttagatgggcctacttaagtctgacatttctctgcctagccttcacgatctacctatactgattggaatcaacttgtttcgagcaaagtcgaccgtgcctagcctcagcgatgccaacctgtcaggattttagagcctaaagacaacatcgggtagtatacaaagacctatctgtattcgagattgaagcagctcgatgctaaagaacaagatccaggagggaaaaataagcactatccgctcctcttgtccttctcccttctcaacccgaaatcaccacgtacgactcatttataacgccgtgaaggaaacctgcctcggcatcagatcacaaatttgttcatcgcaatcaacaagtaggatcctttcaacaagcatcctatcaaagcaagttctcctctactaccaacaaggggatcgctttcagccggctgactgatcgcccattttccagaaattacaacaatgacctagctcagagttactgagtttgtgactcccgcgttaggattcgcacattccgtctcgaaatccgcaatggacatcaccctacagtctggggaatagagacatacgaatcaatcaacgaatctccgactacaaagccagatggccggggacattttctatgttgaaattagtataagggcaaaccatgacagttgatggaatccgagatctttcagtcctcccaactgtttgacgagacgctcgtcccgctgccaacctgttggatacccggaaggcagtcacccatatgggtccagatcaggagatagctccgctctcctcctcttctctctcttctgctcccgtgcactttattttggtcgaatcgatactggttgttctcctcatcgcagatacaatgtagatcgatcgccattacaaccctatatactatgaggcgtggtcaaacgtctgggccctaggtgacggcgatggaaaggactgcgagacccaatataaacagcgcagcggcgacccccgctagagaatgaatgagcagtcttcatttcctagtgtcggggacccttgtagtggtggttgtcttagccttggcttgggtctgcgtggtgagacggtaggaaagtgcagttggggtatcggggatgaatttgatctcacagatcctgctgcccctgatctgtaagtggggtgggtagtaaaaaggacaaaggtgaaagtcagtttagtcaaatttcgagtttgaagtggaatcaatcgcaaatcggaagtgaaattcaaccgtaaatagtagaccatgtgtgttaaaaaggtatagagtagggttgggaaagatagggcagctcagtgacaaaaacatggccgttcatgttcaagtatccagtgtcattcataatattcttccattttggtatctatgtcataaaacaaaaaggaacgtgtcctttctatacatgtagcatctctatcgaccatttctcgtacgaaaaaagcttactgcttatcggggaagccgaagtcgacaccgaagggagggtagacaaagcgctggagcttgccctcagcctggagaccatcactgtacttgcgaagggtagccaggtcctcagcgtccaagaagatcaagtcggcacgattagcctcaatgcgggcaggggtgacggacttggccaggactgaggagccacgggcgactagggagaaatcagttagtacgctatattcggtccagtgggtaaaggctagagatacttactgtgccagctgagcaaaacagtagccggagtaactccgcgcttgtgggcgacggccatgatgggctcagcgctgaatagcgggctgccggtactgccaagtgggctgtaagcggtgatgtggatgccagtcttgttgcagaagtcgacaatctcctgctgtgggagcaaggggtggttctcgatctggttgacagcgggaacaatagtggcctgggccaggagttcctcaaggaacttgagactatagtttgagacaccgatggccctggccttgccagtgccgatgagcttctccatatccttgtatgtagtcacatgggagtggctgtggataatgtcccgtgagccatcagcgagcttggggaagatgttgtggtttcctgtgatggaagtcagcgccgcgaatctgcatatttgaagaaattcaactcacccttggggttcattgccagaggccagtgcatcagatagaggtcgacatagtcaagtccgaggtctttcagactctgctcaagaccctcctcaacacgagcgtggaaagagcaccacagcttagtggtcacgaagagatcctcgcgcttgacaaagccggcgtcaatggcctctttgatgccctggccgacttcgttttcgttgccgtagcaaagcgcggcatcaatgtgacggtagccgaccttgatggcgtggaatacggcgcgcgcaacctcgccgggctgggattgccatgttcccaggccgagtgccgggatctcggctccagtattgagcttgaaacgggtatcgcaggcagccattgtggatttatcggggtatcaagagagaaggaagattatttacacagaataagggaatatgaacaaattgaagtagaaatggtcaagaaaagctctggggaaaggcgggggtttacaaaggataacaaccccacacggctatcggggttattccgttcctccaaggtcggccttttttccatcaatcacctcgaccatcttttgggatcttcgatgtgcttggaattttctactgggagagttctatattttttcgatcgacctcgaggagaatgattttccccacacaataaccgtcagaccaggatccaggagaacaagttagcagatctacggaaaccgtcttccagttcgacagattcctctccgcttgacatcacagccactccacatggttggcctgtggtcgtggggtaattgtggctgccaatcatcgtcgcccttttggagagcaacccagatctccatcggcgcggaagccagaatccgtgatgtttgatttttcgtcctacgtgcgagtacatcgatgtcatggcaaatcaggcaaatgaggcaaatggatatggggagagccctcacaccactgctgatatcggaaatctacacgcgatattttgcacatcggattttcctggccttaaccctatatatacactggatctcctagtgtctatccttcttttaaccccagactttcctgattgttaattgcaattcatttggcaatctgaaacttcttatatattctaccaagaaacactacttcatccaacacagtcgaaatggcacctgtcgccatctccccacaggcctcccctgtcttcaagaagcgggatggccacgcactggaagagctctcggacgctatcgacgagatcaacgttctcaaggacatgaagaagcgtgaggctgaaaagaaagtggccgaagagaagggtctatatgacgagtccgagttcgacaaggagaaggacaagaccaacttccgccagtacgaggatgccagcgaccgagtcaagaacttctacaaagagcagcacaccaagcagaccgtcgcctacaacctgaaagcccgccacgacttccacagcaagactcgtgccgagatgaccgtctgggaagccatggagaagcttaacaccctgatcgatgagtccgaccccgacaccagcctttcccagatcgaccacctcctgcagtctgctgaggccattcgccgcgacggcaagccccgctggatgcagctgaccggtctgattcacgacctgggcaagctcctcttcttcttcgatgccgaaggccaatgggacgttgtcggcgataccttccccgtcggctgtggcttcgacgataaaatcgtctacggccgcgactcgttccgcgataacgaggacttcggccacaagatctacgataccaagtttggtatctacacacccggctgcggcctcgacaatgtcatgctgtcctggggccacgatgagtacctctaccatctcgctaaggagcagtcgacccttcccgatgaggcactcgctatgatccgctatcactctttctatccctggcacagcgccggtgcgtaccacgagttgatgaatgagcacgaccgtgatatgctccgtgctgtcaaggctttcaacccttatgacttgtacagcaagagtgatggaattcccagtgttgaggagttgaaggtatgttttttcgcttctactgatgatctgtgaattcgaggctaacttgtttctttctagccgtactacctggaactcatcgatgagtacttccccaccaaggtcctgaagtggtagacgtctgcgacttgctctcctcgcgtctttattccacaaatttttcatgattccccatttttgcactagttctatgaaaatagctacgatacttgccatcacattcaattagcgttaaaaaccatactttgtcaatcgttccaagcaatcaaacccagaaattacctgaataaattgatagagacgaaattaatcaactcttcaacactatttttcacacttcaaagtagtcaagcttcatagtctagcgctcagctttctcaactctaataatctcacattacaccacattacaccacatacaacttacattcgtcaggacctctttgaggttacggagatgtgaagatatcaaggatcgctactggtaaaggacaactcacttactgcaattacacaatttcccttcgatattaccatatctagagttagaagagtctactttggaccaaaacacaagatcgcatcgatatgtaagtcatgtcatcttcatttggaagggtatgtataagcgttgaacgtatatagggtatattttaaaatccccagggcacatcacaaattatttacagactagccaactgcgaccgtttcccatcctcatcgaagtaaatcttcttctctgtaaccatggactcctgcagcgcagcaccaatgcgaacagccttgacagcattctcaagttcaagaggcagtgccgtgttatcaagacagcaagcagtgaactcattggcctcggtaacaaacgcatactcgaagcgatcatagtagttctgggggatctccctccggacgccggtctcatcgtagatattaacgtggttcattgcaggctggttgttaatcgccagctttcccttggtgccgataatctcagtgacatcctcctggccagcggccatcatgcgggaagcatagaagtaggcaatacggccatcgtagaactcgaccaagccgacggcgttgtcgcggtcgttgtgcttgcgcaagtcgggctcgacggctgtgttgccaatcgccgacactgacttcactttgcagtcgttgccgaagaaccaaagtgtgaggtcaatgtcgtggatggagcagtcgacgaagatgccgccggagaactcggcgtatgcgacaaagaacccgctgggatcgagcttgtcgcaggtctgactgcggagtacggatgcagtgccgattgctcctgcctgcatcttctggtacgcgtcgcggtaggacttgtcgaagcgtcgggagaagccgcacatcaccttgagctctggcttcttggctgctgcgtcgacgacggtttgagactgtataagaggcgggttgttagtacttggtttcaatggttgattctttgtatttggtagactcattgaggttgagctggattcaaaatacaactgacttaccacttcgggacttgtggagataggcttctcgcaaagcgtgtgcttgcctgcttcaattgccttgattgcttgctcggcatgcacagcagttgccgatgcgaccaccacggcaaccagaccttcatgcttgagcatgtcgtcgtagttctggtacagggttacgccaaagggctcgaggtggattttggcccattcgagttcgacggggtcgggggagctggcagccacaagctcagctcggggagtacgctccaggaagttcagggcatggcgcttgcccatacggcctagaccggcacagccgatcttcaatctttgggtagccattgtatataaaatgtaaaggtcaaagaaaggatatcaagaagaaataaaatcaatagctaatagagagggaattctacaactgggcgacttcaagttataaggccgaaactaaatgcggaggtcagtctccgacaactccgcaaaacgtggggtcggaaagtgaattccaccaccgacgaagtcctaaaaaaggacctcgggacataaaaaaaaggctatcaactcgtgaattcactgccgtcggctttcttcgattcccgtcgcaatcttcgcttcgcaatatccactggatccgcaaatccatcacctctcagccaggtcaaagccttgcgtagtcccccaccctgcacggcttcagggttcccctcaaggattgaccccataagcgcccaggacagaacaaacaacaatagttccccgcccttgcggcccttccatagtccacgcttgaccccggtcttgtacgccgaatcaacagcgacccggaagaaccagaggaatgtgctgcgactgtttcccaggaacaagaatggcagaccgcccagtgccccactaaggaagaatcgcttggtaggaagcgttgtgcggggcaagttgtggttcaggagacagacactaccccaggctgagccaattgcagcagagataaccgctgtcatggtgataatacgcttcgaaatagtattcactgacgaaataggctgaagcagaatactcttgaatttggggattgaaagcgccagagtgatggtcgttaagaatcgcgcaagcggcggcacggagaggagaatgtggtgcaagaacgccgtgctacagttcgggagcttagggtgcaagagagcgcatgatagacttgtgattgcagggtgtgctggtccagtgattggagagatggaagctactgatgacggcaaggtgttgagatcaccagggtgtagaattggagaaacgaatgccctgtgtcatattagcgactatactcctgaacacaatcaacttcaaacatacggccagcggagatcagcaatggaggcaagagagttcacaatctcttctttctcgggccaggcgatgttgaccggaagcgactccggtcggccttgaatgtagctcggcgagagcctaaaaatgacttttccaaaccactatggcatcattttagcgaccgtgactcaagtaaaggaattccgaccacaaacattaggcgtagtctcacgatcaaacacgaaagcatggaagagctgggcaaacgagatcggcatcaacagccagctgccgaaccaccacgggcgcctatccagccagcctttcgagtccaggacattgaacaagaactccaagcttctggtgcctgtgtaaatcgccgcagtcaatcggagctggtcctgcggacagatgcctagcgcgaaaccagccagacttgcgccgatcgctggcgcaaagcgcgaggtcagcgcctgcgagacatacgggttgcgctctctgaatggctttgcatcgtcggtgcggaggttcgctcgcaatcggacgaggaagcggtagaggaggcgatggataagaaggagaagagagagagagatggagagacggaatttgggagatcggaagaggggcgttcgggtctttttcctgttggttggagcgactgttagtgcatgcatgttcctaaaagaggcatctgcgtagattaaatcgatcttactgtgaagcgccttggaaccgagtaatcaacagatccgccaacttcaacgcgattccggagccgacaaagactcgcagcgatgagcgaatagcggcttcactgtgtcgattctttgggcgagcgatgacatcgtagcgagatggagatgggagcttgttttggatggtaggggcgcgtctgaccactgattcatggaggaatcggtattctttggcgctgagacatacgcggaggacgtcgcgtaaggcgcgaggtggaaggtccagcgcatcccctgggactggagggttgtccgcagacatgttgttgttgatgccaagttagagcatcatcaggtgaagtccggggctgagaaggtcgagtggtccaatgcggagaagccgacctcggcaattcttacccgttggtcttgccatgacatttcagtattctgtcgatatcacgggttgtagccttactcaccatggaagctattgggtatcttggggatttcagaggccctgactacccagtcacattttgtttgtttctctcgtgtcatctaccgcgagaatggcttttccgcatacagtatctttccgacggggaggtgaagagcgaatttttataacaacacgactttcattcccacagacactatttgaatggacggtataacgagagtatcgggaaagcgaagccacaggacgatatgaaggtcctacaggacctgcacttctggctaggagacatggctgacgcatctcagctttgcctcgagcggatccttgaggccagaatcatcatgaagcttttatgtttctcatccttgttgctataacactaaggctaacaagatactatattcctttttctaggatgaatctgtccgatacgctatatcccaccatacatgttatgttgatgcgaaattacagtataactgaggtccggctcaacacttagatgccaccctgaattgagaaccggcataaaggcatttttcacctttgcccaagagatctgcctcgatatccatgagccggttgtacttagcaactctctcaccccggcagggggccccagatttcagatggcccgtccttaagcccacgaccaaatctgcaatgaaatcatcggtcgtctcaccagatcggtgagacacaaaaacactccagtcaaagctgtaggccaagttcgccctatgaataattagaactttatctctgggggaattgtaggggaaacctacgcctcaattgcttcggagatggtgcctatttggttgattttgagcagcatcgaattgcacgccctcttttcgttggcctcctgcacatatttcgtattggtaaccagcaaatcatccccaaccagttcaactggacattccttgttgaattcggtccaactgtcccaatcggtttcggcgaacggatcttcaagtaaaacgatcggataattttgcaacaatgagcgatacaggtctgtaagctgttttgagctttgcaagttcggtttgtcgtctttgaacccaatatcgtagttcccatccttgaagaattcgcttgatgcaggatcaatggcgaattttattctgccgctatatccagcaagagagacggcttgaaccaagaggtctagtgcctcatgaggctgggagatcggtggtgcaaaccctccttcgtctccaataccggtagcttgagagtatcagtaatggctgcgtaggatccatagtgaaaggcgcactaaccagatgttccatacttctcgacgatgaccttcttcaacttctggtaaacctcgcagcccatttgtactgcttccgtgaaagatgatgctccaacaggagcaatcatagtctcttgaaaagccatcttgttgcccgaatgcacacctccatttaggacattgaagaacggcactggcatgacgaatggttttttcgctccagactcacgccgaaggaactcgtacaatggaatcccctgatatatatcagccatcatgtcgaatcgtcaaccttaattatagcttacagcatgggctgcacccgctctggcacatgccatgctggcgcccaaaatggcattcgcgccgagcttcgacttatttttcgtaccgtccagatgcttaagaaggcaatcaatcatcctctggtctgtatcaaccttgagcccgctctgtactagagcgggaccaatgaccagtcggatgttcgaaacagctttctggacgccctggccgccatatgcagaattatccccatctcgcagctcaatggcttcattcgcacctgtagatgcaccagacggaacgatggctcgaaaggtacctgcatcggtgtaagaaccgagtttagctattgttggtgctctcttacctctgtccgtagtgagatcaacttgaacagttgggtgtccccgcgaatccaagcgctgggcagcttggaccgacctgatcatcgtgaattcgaaatgatgtagcgtggtgagttgatgggttcaaagcttagatgaccatcgcatgagaatgttttgttcttgctattcatcatccaggtacagtaaatttcacaatggcaaggggtgacgtagagtaactataaattaactgtgacaggtgatgatgtcaagcggatggcggttgattctcatagccagatctatagaccaacacttttctttattgtacgcttctgactccaatttactctcgggcaatctgagcctatcgcgatggctcattgtaaaataacttggtaagcaggatatggttgtgattattgtagttactagacagatccatagtatatatactgttcgagcggaaagttttgccgcgcctttcgaatccattacgacttcaagatgttcatttgaagcaagctgcattgcagttttgtccaaattcttcgcaggattgaggtctactgttttctggaagttgtccccaaagatcagctttataatacataaatttccgaaacgagctgtcgctatccggggtatctccttcttgtttgttccgatggtttatatcaaatcgattacccaactgcagtaagctcaccacaaagcagataatctccttcggtccttctactacacaactcggatagagcaactcgaacaccgcatcggtatcctatcgcgcttagcgaaaggagtgtatgcccataatcaagtacgatatgcttgaacagaatctgtgctcaggtcaggggtaactagataaatgcatacctaaatactccgtgcctatggagtccccctaggcatctttatttatgtatactaatacattgttgtttcactgcatatctagatatggcaccaatcaaacaaaagaccgcatgccaaattaaagagtggatttttgtctcagcgccacaaaatctctcgcgataagtcttcatgcacggagtatttggctagccctaaggagtacatcgagaaattcctcaaatcaagtgcttggcgtgaaacacaagcttgacggaactccacatggcttcccaggtatcaattccatatcgcgattggacaataaatattgcagcccagactgaaaccccatgtctcattccgtttacccgaaaatattccgggaattaattattccagcaatgattgttttcagcggggccgtacgtagtagattcggtggagctaaatgtttcggagagttgtcgtagccctaatagatgaatacaacggagcacctaacaattaccatgcatccatggatctcatggctctccaatgagtggtccggctggaaacaggggtcaacaccatgacagatggtgatgttcccgtttcataaggatactagcgcaggggctataaggaggatactgtgcaggccaagcatttaaatatcaaagccaagctcgatggaatagcttattcaaacccatccattcattcttacttcatttcattcttcattctattcggctagttccgaacatttacactctctttacttgtctgttgatcggacatttacttcaaaatgcgtacatctttcgtttccatgctggccctcggcgccgccgttgtgtctgctgccccagctcctactagtgtttccgaactggttgagcgctcgtcctcgacttgcacctttacctcagccgccagcgccattgctagcaagaaggcttgttccaccattgtgctggataacatcgaagtccctgctggcgtgactctcgatcttaccaagctggagagtggtaccaaggtagatatttctgttattcaagggtcgataaccaaagatctaatagctgctgtataggtcatcttcaagggcgaaactaccttcggatatgaagagtggacgggtccccttatcagcatctccggctcaaagattgaagtcagtggacagtcaggccatgtcatcaacggcggcggagcgagctggtgggacagcgagggaaccaacggcggaaagaccaagcccaagttcttctacgcccactccctggacgactcgtccatcaccggcctgaacgtcaagaacacccccgtccaggctttcagtgtgcagtccgataacctggtcctcgaccagatcaccatcgacaactcggacggtgatactgagggcggccacaacaccgatgccttcgatgttggctcgagcacctatatcaccatcagcaacgccaatgtcaagaaccaggatgactgcttggctatcaactctggcgaggtaagcagtcaaaggatacttctaccataaaaaaacaaatgaaactaacctggttgtccgccagaacatcgtattcaccggcggctactgctccggcggtcacggtctctccattggctccgttggcttgcgctccgacaacactgtgaagaacgtgaccatctccgactctaccgtgaccaactccgccaacggtgtgcgcgtcaagaccgtctacaaggccactggtgcagtctctggcgtgaccttctccaacatcaagctgtccgagatctctagctatggtattgtcatcgagcaggattacgagaacggcagccctaccggtacccccactactggtgtccccattaccgacctgactgtcgagaaggttaccggcactgtcaagagcagcgctactgacgtctacattctttgcggtagcggtagctgctctgactggacctggtctggaaattccgtcactggtggtaagactagcagtaagtgcgagaatgtgccttctggtgcttcttgctagattgctagggatcaaacagtgatcaccagggcatcaatcagacgagagtgggctattttcaaggcaaatttgactgggtgggctagaagacgaggttaaatatgctactagtccctttggacgtcattgtacttagatagccatctgtagatggattcaattgaatggttttcagcctacctaatagtagctgagaatgactatactgtaaaacaccttaaattagcaaaattcactcgtagattcaatttcttatgcgtctattaatttctatctatgttgtacatattttgtcgcaactaacgccaagctgcacgttcgggaggtgcatggtgatgacgcaacgagttcctttccccaatcagccaaccctcaagcttcttctcttacacatacaaagccacacccaaatcatactcagaatgcatgttcttctactcggcggtcatggcaaagtagcccttcaccttactccactcctcctcaaccggggctggagcgtaaccagcgtcatccgcaaccctgcgcacgaaagcgagattctagagctgggccaaggccacaagggcaacctcaaggtgttactatcgagtctagaggatgtcaagagttcctccgacgctcaaaaaatcatcaacaccgttgtaccggactatgtcgtctggtcggctggtatggcaaccctcacccctcaccccgcacttatctctaaacatcgcaacgcaacgcacattgcaatgagccatccccaaatcaaataagaactcgaaaccatatagacctctataatgcactatggaaaatcaacaattccccaaaccacaaactaacacgcaaacccaggcgccggcggaaaaggcggtgcagcacgcacaatcgcgatcgaccaagaagcagcgaagcacttcataacagcatcatttgcatcaccaagtgtaagcaaactcctcctggtgtcgtacctaggcagtcgacgcaagcagccgagctggatgccggacgatcaatgggcgggtatagtgaaggtccagacggaagtgctgccgacgtacgcgaaagccaagctagaagccgacgagtacatgacagcgctggctgcacagcggaagcgcgagcctggaccggcgcggcctttccaggctatcaatctgcggcctgggattctgactgatcagcctgcgacgcggaaagtcgagctggggatcacgcctaagggtgacggaagtgttactcgggaggacgtggcgattgtggcggatcttttgcttgctagggctgatacggagggatggattgatcttgttaatggggatgagggggttgaagaggctgttgagagggttgcaagggagaaggttgatgctgttgttggggaggatgttgagggtatggtcaagaggttttttccttaaggaacaatttccgggcttgaatctctaggtttctatactagaaaaggcctgggattgacaggatactctactcttcggatcttccatatatcattcaattatgaaaacgaacgtgaaaagatataaagtttatatggtgtgcatatctaagaaaacatattcacagcttggctttgggtgcctctaccacccccttgaacttctgcttcagaatccgacgcaggatcttcccactagggttcttggggatctcatccacaaactgcacaccaccccgcagacgtttgtggctagtgaccttgctatccagccatttgataatgctcgctgcttcttccttttcgctccttccagaagacttgctcttggcgctgcgaacaacacaagccataggaacctcggaaccgtgtgtctcactctcaataccaataacagcaacatcatcaatagcatcattatcaaccagatgtccttccagctcggcaggaggcacctggaaacccttgtacttgatgagttccttgacacgatcggtaatgtagaaattacccttggcgtcctggtacccaacgtcgccagtctggaaccatccgtcctcagacaaacagcccttagtagcctctgggttctcgtgatagcccatgaacacgttaggtccactgacgtacaattcaccaacctcgccgacggcaacttccttgggttcggaaccatcctctggcatagtcatatacttggcttgcatattaggcatcaagcggccgacggaaccaatagcctcgcgccaatcctcccaccgctgggagtgtgtggttgggctagtctcgctgagtccgtagccctgtttgatgccaaccttgatgcgggagtaaactgcctctaccagctcatgagtcagcggtgcagcaccggagttcatcatgcgaagacttgaaaggtcatatttgtcgaccaccgggtgctttcctagcaatagcaccactggagggacaatgtaactgaacgagcagcggtagttctgcacgtgagcgcaccatttttctatgtcaaattttgacatgacgaccaagtggtaacccttatataaagcctgggcaagtaggcaattcaaccctagagactcacagttagtatcgtgttcatccgagcatctacgcgattgaaagctataccatagatatgatagaacggcaaaaatgccagtacccgatcaccctttccgtcaggaccaccattccaactaaggtttgccccttcagcgatgtactgctgcctaatattggcaacgatattccgatgcgacagcatgacacccttaggcacacccgtagtcccagaagaataaaccaagaaagctacatccttcgcgggagtgaccttctgcttgcggtagcgagtagcaccagagatattgcgcacagagctaaaatgcttggtccgcacatcgggatcccgctggtccccaatcaggataatgcgatcctcggacaagccgactttcttcgcagcttcccgcgcaacagacagcaccgaggcctgcgttacaagtcccttggcgttagagttcttgagttggaaggccagctcgtcaactgtgtagcctggattcgcaggcgaaataattccgccggcccaaagtgtgccccacatcaccacgggtgtgtcgatgctgtttggcgtgaagagggccagcacatcgcccttgcgccactcatacagagctttcaggcccttgccaaaatctagcgaggcctcgcgtagcgatttgtatgtgtaatggcgctgggtatcggcatcttgatagataactggtgggggtcagcatgaagaaaattcaagagaaatgcaaatgccgtgttcaacgcagcgcaccactgggttctcattgaatatcacgcactcttatcgtcggggtaagccctatccttgcgctcaaatagaaaggtccagaggtccacttctgggatgtcgaccagagggtaattggaggcgacaggcattatggaataataaagccaaggattcgatgccggggaatgtgatcgaggctcaaaaagactgtcaggtggaagacgaaagggacgcacacgagcaaccaagtatgtacttaaaagaggtgagatgggtctttctccgcaatctcggctgacggcttgcctcggtccaatatcgcgggggcccaagccaattaaaaactgcttgttccttgactcttcggcattagattggaggaactgaaagatccaatcccatactgttcactgcatattccgaataatcatctgttccgttgaggttcatgcaggatactcattgatatccttgacatccatccttgatatcggcactcagagacctcgatctcggcagtttgacagagataagcaactacttcaccgaatgccggatgaaaccttggaagatagaggaaagacacttttatagaatagctcagatagaataataataaggtctggtgaatggaacatcgcaatgtcatgcccacctggaacctcacaatttgataagcatcagcttcaaaccttcgaagtcaggtaatttgatagtgacctgaaacagtttaatgcaagactataatacacaggacgacgtggagcggcctactcattcgggaagagaccgttgtaggaatatatatatgtgtagctcgagatatgtgtccatgatagcgatgcaaaggtatagaatgtgctgccaatgattgctagtttatattccattacatttacatacaatgaggctcaataaataaataaattggatacccacgatgcccccttccccagagtaaaggtagcggagcccaatttgtggaacaattcacagtaatgtgtacaacggtgcagtccccatgaacctcacgacctagacgtagggaccatgagacgggcctgtcgggtgctgtctagtctgcccctcggaattacttggcctacaatgtgtctggaaatgaatttgtagtgtcgttagatttagactccttccccggcgacacaaagcgagacgagtgaaggagtatctttttgacctcgtcagattcgacgagggactaaatccagatcccaatatgatttcatgccgacaagatcttaaattgagttggaaacagcggacccagactggaaatacatgctgaaaaaaagagcccagatgagagttttgctgaattccatttttgctttcccagcaccatttcctccacacgccactccgaggggaatcgtttgaaatcgtttacttgaggggaatgaaacgggaagagtgggtggcaccaataccgggacgaccgtgcttgacgggcttgctaggaggttgttagtgtgctgatgttaaatggccatgcgaacaattcccgggagcacatactaagagatagagaactcagccaagtagtgaccaaccatctcgggcttgatctcaacctggttgaactccttaccggagtagataccgacaacggagccgatcatctcggggacgacgatcatgtcacggaggtgagtcttgacgagatcgggcttctcgttgggcttggcctcctgcttggccttgcggagcttcttgatgagacccatgggcttgcgcttcaggccgcggttgaaacgtctgcgggcacgggcgtgaacgacatcacggagctgctcggaggaaaggtcgaggagcctgtaaaaggattcagtcaggataatgtccttgcttgtttatgatccctgttgtccattcgcaacgcagcgacaaagaggcgagaataaagatgccatatgcggttcatccataatggttgttgacattgtaaatgaccaccttcaatttcgtctcacgaggtactggctgcgaatggatgtccaaggattcgatgattggtaatgtaaacatactggtcgaggtcaatgccacggtaagaaaacttgcggaactgtcttctcttcttgatctctgctcggcgaaggttcagtcagcgtctgcgatcttgctgtagtgcgtatctcccatgtccatgtcgttccccgctaacgtctttcttcaatcatctccgtatagtcgattgtaatgcgcgccgtctcttctcattcgattcttctgtccatgggcgatgggtagggatgggtttgcttgttcataacgtaccggcagcctcctcggcgttctagatgaaaactccatgttagtgtatcgcacgggcttgaagggcgagggcgaaaaactcacgtattcgatgtcagccatttttgcagatattcctgtaaaccgcctttcgaccgtatctcgaaaagcgaaggagatgggttgtcggaaattgtcgtgtcgctaagcggtcgggctgctaacacacaggctgtaggaggtgggcagcactcgttaagcgacgggtaggttccaagccctagacactataccctttcgggtgatacgtaatttactttgaaacattggttttttctttgtaatcaaactctttgtattttttatttacttgactttgcttggggaaacatcagtagcgtttgtaccatttgtgtaatttatttgtattatgataacccattcccatgatatggcagaatcggaggctgttgatggtccttatcaaagtacaatctgagtacgcttactccgtagttaccatgacgtggatgattgaatctctagttctccaagagaatttgacacgctaactttgagagcgggtctcggcgatcattcaagaactaaatttacgcattgagaaaaagttgtagcgaaggccagacgaattgtattggctataagcttattccagctcacatgaagagtcgcaactgtatcaaaacagtctcaacaaaacacacttgagaagccaaccggcgcaaatcttgcccggactgacgaaccaaccaaacatctgttccccagaactatgatttttaggccttggattaaagcgcttaatcgaagagtccgaatcccatatcctcatcggactcctcctcctccttctcctccttcttctcctcagcaggagcagcggcaccaccggcagcggcagcggcaggggcagcagcagcaccgccaccggaggggacggaagcgagcttggcagagccctcggagatcagctatataaagagtcagcatgcatttcaggtaatatatatgcgcttgcgagtatcactgaccacctggaggtccttgtccttgagctcggagatgaccttctcgacgcggtcaccctcagcgtcgataccgacggaggagaggacagccttgatatcggcggcggagggggcctcgttgccggcgagggcgaggagcaagtaggcggcaagatacttcattttgaatggactggaaaaaaaatcttcattagtatcgaattcaagatcgaatgcgatcgtacttttcaagccgcaaaatcggctgagaagcacataaataaagtgtacgtaccgttggtgattattatctgaacaagagaaacaatcgatttaaccgcgaattgggcggagactgcaacgtcgagttctggtggaagaggttggttgacgaaggattaaccgagtgctcaaaatcttggaaaaaaaggtggtgcgagtgggtgtggctagtgttggcgggacttctaagcgagtgctgtggcgcggtgtattcgctaccacgtgacctttgcatatccggccttgataattgcatgctggcccataaacctgtctctcttctctactcctctactgagtacataactctcacttcgaaagctcttgggccaagtcaggcgtgttcttcacatttgctacttctgttatcttggaataacagaaaatctggagagagccaagccagagatctattctcatgctatcgggctcggagtcatgaagttacttagtcgtaccaaatatcgacggtgagcgacttctttttgtaccactcttcgaatccaggatttaaatcctcgggatatctctcctataatcaaaatgagtgtatggccacctatctttctcttcgtttcacctcattttgactgacatagcatagttcctcgattccattctctcgtctatccagacgggtaagccctcccaacttccggtgactcaggtgcctacctcgcctacacctacctcgcctgcgcctgcttcaatccccaaaaaggaggatcgcaaaccgaccgctgtgcgacggccgccctcaaccagcgggaatgtcagtggagggatcaagcgcaaagctgatgaacagctgcctcgcccaccaaaaccagaaaacaaggtggcaaatagctccgccgcaatgaggcctacacttcccacgaggccagcggtatcatcagtaccacccagagttgtatccaagccaaatcttccgaccacctccaggccaaccatgcctaaacccacccccaaacccagcttgtctgcgacgccaaaagtgatacccccacggaaggagcccgaccccaagcccgcatccgcaggcgctgccacaacctcgaagccgccaccaaagggatcatttgcggagatcatggcgcaggcaaaggctaagcaagagacggcgcctgtgggagtagggttgctacgacaccaacccggctccaaagaaagacttaccaaagtggagcgcaagcggcgcatgatggaactccaggccaaggaaaaagaagcgcgtttaggtaggaaggctggatccggtgtctctgctaagggtaagcctgctgtccggcagcgcgattccgagggaccctcatacaaggggacggccaaaccgacgcaaactcccgaaccgcttacctaccgtggtaccgcgggcctgccgtcaaatcgtggtggaaatgaccgtcgacaccagtctcgcaaccgacaaaatgaatatctcggaactgacgaagaagacgagggcgacctcggtggctacgacgattactactctgatgcgtcgtcggacatggaggctggaatggatgatgtagaccgtgaagaggcggctgcattggcatttgctaaacaggaagacgagaaagagctacggcaagaaatggcggctaagaaagagaagttggagcgccagcggaaattggccgctcttgcttctaggagcaagcgttgaagtttggacattttatacagtcaactggtttctttttttccttctgatcactttccttgatctcttttgttttggataggactacatgttaactccgcattatgagcgttcggggtgtccatagacggggatgccttcatttttttttgctttgaagcaccatcaatagcgagcgctatatcaataccaactttcttttcttttgactattgttctgtacattgtagccaatattcaatattgaagtcatcggcttgatattacaaccccggccccacttggcaggtgacatcactcgcgttcacctccagcataaccttgaaagtaatcttctacaatttcacaatttcaccatttcaccatggagtcagttcatcatgtctcggtctcatcgaagattctcttcagcaaggtgcgcaagattgtgcctccaatgctcgaaaagttccacaaaggtctgttgattatgttgataagtcgattgaagctatcgaccacgcaatgaaaatccccgctgaccagtagtctaggacaactcggccgggtagctgttatcggaggctgcgttgagtaggttgtctgcctgttgacactggtatcctactaactggtataagctatactggggctccatacttctcatccatggcctctgcaagacttggtacgtttcctaaacaggcccatgctctccactagatatattgactattgaattgcagggtgcgatatggtatgtgcgaaagatggcataccttatgcaaacgactaacaaccaccagagccacgtactctgcgaacgatccgcagcaccagtaagctaaaatccggccttgattgaacctactctaaacatgtagtacacaggttatcaaaagctactctcctaatttgatggtacacccattgcttccaagcagcgacactgtcaaggaccccaattcgattgatgcaccagcactggcgggtccgatcatcgcgatgttatctcgcctccatgcacttgtgattggaccgggtctcggccgcgatggcgtgacgctaaaggtagtcgcggaagtgatcaaagaggcgcgggcgcgatcgatcccgtttgtgctagacgcagatgggttgctgattgtggcgcaagacccgggcctggtcaaaggctacaaggactgtatcctcacgccaaatgtggtagagtttgggcgtctagccaaagcgctgggtgtcaaggtcgtcagccaagcggagattgcgcaaggcggaaacggcgacaccatcagcaaagcatcagatgagtgtgagcagctatctcgagccctgggcggcgtgacgatcattcaaaagggtcctcaggatttgatatccaacggggttactagcattatctctgataacaagggtggcttgaagcgcagcggcggtcaaggagacactctgaccggatcactgggcacattccttgcttggcgagcggcttatcatgagaaagtgtgggactctggggagcaggataacgagaaggcagcgcagggcaaggaagatgttcaagcagagctcgattctgagaacaaacgcatgtccccgacaacgactctgctattggcggcttgggcaggaagtagcattacacgagagtgctcgcgacgagcctttgaagccaaagggcggagcatgcaggccagtgatttgaccgatgaggttcacggggcgtttttggacctgattggagagccagaagggtctaagacgcacctctaggctaccatataaaatgctactagctattcatctatgtacgagaaagacagtgcagcggtatactccggagcatatctccatgtacctaagcccagctgcatgtaaacccacggcaatgaaacatgtctcgtccacttttatgatggctctcacaagcggtgtctatagttgccaagaagaatagtctcgaaccctgcatatcttagtcaaaatctgtctccgatattgcaatctcgactgcactgacttacgtggtgttatatcgtagcatagggcatcttttcttgcattttacctgagataaagaaactgctcatagtatgcgaatctttcagccttcaataatccattatcaacatggtcaaaacccgtcttccggtgctgatgcttgagactcgggcctgagtctggtcccagttaccaaccattaggtgaaaatataagactaccagccaataaaggtcgtctgacaacacgatatcatcaccagactcggatgattggttttgagcgggtccaacaaggattaagtgtgtcctggttggacaccttagacccttacccttgatggcatgcagagcaatagaaaccaaaaataacatgtcacaagccctgcctcattccagactagcctatgcccaactttcgcggtctcgcttgttttcacctgcctttatcaggttccaaaggtctgcagaagacgaagtcatttgcataaaagaatgcccagcttgtaaccataaatttgcaagcagtgtgagacatttaccttggcaagtcaaaattgcacattctatacggccgttgacgtcgagatctgaatgtggctagagggatggccctgagacatgcaccccgcctccacccttgctaattcgatattccaaaacctaagcagtcttaggcgtgctgctcaaaggcaatgttgggctaataagccatcgacatcaccttggccgatgaacattggtggtgttttggggtattgttccagatctcgtattcacgcccaaccccgtaccgtatatggctataccaggaaacccaggcggaaaatgacctcgtgatgcaacgcagggaacagggtgaagaacgccttctacaacaaaggagaatgaagcttaaggattcgcctaagcatacagatccttggaaacgagtatataagatggcgaatctcccagcaaaagataacgccatcagaaaccaatccccagacacaagacaccagatctacaagcccaatcatccatcaatatgtatttccccatcatcaccttgatcctcgcgactgcctccctggtggccgctgacccaacatcagggccccagtgtggcacctgcaaccccatctcaggcgagaacggatgtgacccttccacctcgtgcatcaacacgggaacatccttccactgcgcctgccgcgctggtttcaaggcatctcagtacaacaacgacttgcaccatcagttccgcctgccgatgccgaactatgaattccttgttttcgttcctgagtacacggcttgcaacaccccgtgtgatgatccgtatgctgctccttccgatctttgcaacgaggtcaggcttcaacaccagtgcgcggcttagaatattggtccgtggtgggagtggtcaaacaagatagaggggtagtgcagtaggctcaagcggaacctatagcgagatattctggcgggttttctggcggattgcatgtgtacatgggtcactccttaatggaaagaatttgctttagtggagaattagcatgtaaatgtagattaaacaagtagactgagaagatctttcctaattcatctcacgaaatcataataaccgactccatttccccatgaatatacccaaacacccgtcgccttaattttagccagtttcacatgcatcttcaacacgtacaagaagtccgacatcaagaaaacaaaaacaaaaacaaaatgtgagactttcacaattacatgtccatatcgtcatcgacttcagtgaagagcagacgcgtgccgttgccagtgacttgccagagctatagagaacattgttagtaaaaaagcacggtacatttgggagttagccacacttacgttcatctcggcatattcatcgatagtcatggtgaggttatcttcagtgaagcctcgggccagtacacgctcacgaatacgtttcatgctcatctcgccttcctctccatctccaatggcagcggcaccactctccttcatactacggatcaaattgtagatcttgctagatggggtgttgtcgctaccctgctcgccctcactgtatagagaagccttactgatctcaatgagacgcagagcctcatcgacatcctcgcgaacaacctcctcactgaagcgaagacgagcaagtgcctgcgaaagacgaacaatgccgagcagagtacggggactgacatgggaaaactgtctcttcttggactcatcgatcttttgtctcttgcgcatggccacataagcaccaaccatgtaatcggaaacattggtaggcacaataggacggtagctgcgtgccttggcaacatactgacggacctcgtggggagtgaatagcacgccagcttcttcactctccgggtgcttgttgtgcatgtggacgtaggtgacgtgttgggccagctcctcgtcgccctcgcgggacggggtatccagaagcaggaacatgacatcaaaacgagagagcagagcggcgggtaggttaatgttctccacaggtgacacccgagggttgtagcgaccatatagcgggttggccgctgcgaggatggaagtgcgggcgttgagggtagttgtgataccagccttggaaatggagatagtctgctgttccatcacttcgtgaatagctgttcggtctgagtcctccattttgtcaaactcatcaatacagcagataccgttgtcagcgagaacaagggcacctccctccagcaccatctcgtctgtgacgggatctcgcatgactgcggcggtgagaccgacaccactgcttcctcgtcccgtggtgtacacgccacgaggggcaaccttagtaatgtatcgaagaagctgggacttggcgacaccagggtcacccatcaggcagatgttgatgtctccacggatgtgcatgccgtcacccatctctttcgtgacaccgccaatcaagagcaataacaatgccttcttgacatcaaggtgtccgtagatttcgggtgcaatcgaccgtgaaaggtactcatacatattaccggaacgttggtgttgctcgatcttgcgaagagtacggctatccatacccacctcattgtaggacttcttgtgctgtgtgatgtgctgggcatccaagtatgtgtcagtcagcaggccggcgcgaatagcccggaaaccagtgtagggagtgggcaagaagatgcctgccacatcgataacgtcgccggggttcagttgacgagtcagagcgccgtaacagtgaacagtcaaagcgcgaggaatatggcccacagggacctggtcggccatttcctggatcttcacttcctggaaaggaacaaacttcgatgcacgagtcgacaggaagagctgacccttcgagttgttcttcttgcattcctccgacaaacattcggtcaaggggaggaattgcttggtggtgatgggctggaacacctcgcaaccacagcgatcgcaagtgtaggcgttgatctgtacagctggcttgacatctgagacacgggtggtgataccgcggactgtaatcaaggtgccgatgtgctcaccgcgtacataacggacggcgagagctttggaatcgcgctcggcgctagaccctgagggtgtgaggggcttgaagttgacagtatatctgcgggtgagctccggagggaacatcgatggggcagtcgcagcagcttccatgtcggcctccatcgcagtttccatagtctcattccgcttctcgcgttgagacatgatcacatcaagcacatcgtctttgaatctgcacgataattagtttagcagtctgtgcattcacatataaacagatttgacatacgtgacatcctttgtctccctgggcataaccgcatcaatcgcttgagagatgacatcgatatagcgttttgtgttcttttcgatagattggacgagcttcaagtcttctccctcgggcaaggatttctcgaactattaccaacattgtaagctagagtttagtcagaggggctcatattgatacttacaattgacaggtcatccaactcaatcaagatattagatttatcccggtttgcgatatcctgcagaatttgcatgtacttgagcttcggctcccggtgcctccttgctcctcgggtgtttgccccattggtctcatcggcatcatccatgaaatcatattcatcactagtcccgtcgtcgatgttcagatcctccaatgcctcggtcgcagcggcttccgaagacgattggaaggtcttgaaccccttcaggaaatccttgaagctattcagttgcgcggaataatccacaggcggggggtattgaaggagagacataatagcaaagtgcgctcaattgaaagcgcaaagaatggatagtgtgatcgggagagaatataaggaagagggtccgtccagtgtctatcggagccccaaattcgctgggtaaaacgcgaacgcgaggtcgggacgcgctcaaaaacgggactaacccatttaggaaaggtatcaattccgacggattatcactttatccgctaacaatatatcacatgactcgtcatcgggccgaggcgaaagagagatgtagtgtggagtccggggtcgcgtttctacgagttcacgattcgctctcctccttgtctttccggggtccacgatcgttcagcgcttcaaaatggcgcccaagaagcctgctgcgacggccgaagtcgcccttatccccctaaagaactgtcttgttaatctaccgccgtcgctggtcgccctgctggtcaatgcaaacacggtcagtctgctagttgttctgtttccgtaggttatcttcggctaacttctagctataacagactgctcagaatgttattatcgaattacaatataaatcgacctccggaaaggccaatggagctcctccgcagcaatcatgcttcctcggttggacgggtatgccgagcaagcgcaggcttgcgcctgtcgttgggagggacggtatcaacagtggatattccagggagcaggaagtatccaccgttgagcttgatactacttttgggcgactccttggtctcacagaaggccagaaggtacaatactccccgtgcgtcattacccacgtggggcgctaacacttgcaggtcggattgttcatccacctcgatccacccgttgcacatacgataaacatcgagccattgacaccagaagactgggagagtatgtacaagctacaagcagctataattagagtggtacttactcgatataaccagtcattgagctccatgccacattcctggagcttaacctcttgtcacaaattcgcgctctacccaatcctacatacaatgcggctcaatcgatgcatatgcacccactcgcattgcatctctctcccacatctaccgccaatattgtcgtcacttctcttacacccgctcccccagatacctcccccttcgccaaaatcgcgccggatgcagaagtcatagtggctcccaaggttcgatctaagacgagtaaaagctctcgggctgacagccgcagcgctactggtagcagcaggaggagtgctggtgggaggagtgcttcgagcactgtacgcccgaagagtggtcggtccgactccagtacacgaggctccctctacttgagaggcgtagaccgctcagcgaccactcaatattttgacgaggaagtagaagatgacgcaaatcagggccttcgtatttgggttgatccggatctgctggctagccatgagctgcgcggagcgacttgggcatgcgtgtcggttgtccagccatccggtctcaaacccccaccagatccccaacagcaacttgctcaggctgaacagcaaaagtccaatgattctggtgcccctgcaaccaagctcgtggctaaattgtttccatgggaggaggctcctgacaatcggcatgtggcgctttccaccttgttgtgcacggcccttggtgcagagaacatggttggaggaatcatccgagttgaagcagcacccccaccactgcatcgctcggcagtcaagaccctcaaagtctatcctttcataggcgactctttaaagaagaaggacgggctgaagttcggtgccgacactacggcatctcgcgatgccctagccgagcgcctcaaagtcatctacggcagcactgggtccgacacagggctgttctcgggacctttgactgatggaatgattatacccaaatctgactatcacccttcagtctcttcgttcgatggtgctattattcgctttgatccccctttgaagggagctcctgacgaaacaaagtcaatgtttgggtggttgctaggctccgaagccaagctgaatcttgaagtgcaggctgaaatccccaagccatttgaccctagttcgcaggcgctacctatggaggaccctcttccagaaactgcccctgaattagtagggattgattctctcattgaacagtcattgaacaatctaacaaagtcgtcgtctatcttgctgaccggtggtcttggtgccggtaaaacagctcttgcccatctactggctcatcgcctaagacgagatcatctcttcaatgtcaagtatttctcctgccgcaagctcgtgacagatgaaacacgtatttccaacatcaaagagaccttgaatcgcctcttcatgtccgcatcatggtgtgcgcgtcttggtggccagtcagtcgtgatccttgaagaccttgacaagctctgcccagcggagactgaattacaggtgggtggtgacaatggccgcagtcgccagaacagcgaggttatctgctctatggttcgagaatattgcgcgctgaattcctctgttgtgctactggccactgcacaggccaaagagtccctcaataatgttattataggcggccatgtcgtccgtgagatcatcaatatgagatcccctgataaggaaggacgccgaaaggttttggaaaaacttactagcgaagataaacccacggagagcttaaatgggcatgtgagggccacaagctcctcaacacaagattcatggttggacccttcaaatccggggagccgaccaagctcttctgggggtgatggatttgttattggaagggatgtcgagtatctagaactggccggcaaaaccgatgggtatatgcccggtgatcttgtgcttctcgttgctcgtgcgcggaatgaggccctcattcgctctgtctcagatctgacagcaacatcgaagatgatcactctagggttagaggactttgaaagtgccttgaaggactttaccccagcgtctcttcgaaatgttactcttacctcgtcaacaaccacattttcgtctgttggaggtttgtttgaaactcgcaagatgctgttggaaactttgcagtatcctacaaaatatgccccgatcttcgcacagtgcccattgcgactgcggtctggtttacttctctatggattccctggatgcggtaagacaatgttggctagcgcagtggctggcgaatgtggattgaacttcatcagtgtcaagggtcccgagattttgaacaaatatatcggagccagtgaaaagagtgttcgcgatttgtttgaaagagcccaagccgctcgcccttgcgtccttttctttgatgagttcgacagtatcgcacccaagcgtgggcatgactccactggtgtcacagaccgtgttgtcaaccagttgttgacacaaatggacggcgcagaaggcctctctggcgtttatgtgctggcagcaacatcacgacccgacttgatcgatcctgccctccttcgtcccggccgtctcgacaagtcccttctttgcggcatgcccaaccatgcagaccgtgttgatatcatccgatctgtgagtgaaaagctcaagatgagtgacgaagtcacgtctcgctttggtgatattgccacccagaccgaaggattctctggtgcagatctgcaggctgtcgtgtataacgcccatctagaggcagtccacgacacgctaggtgaccgttctaccgatgcagcgaagcccaattccaagtccaactcctccgccaatgcttctagcaagtccttcatccagttcctctattcctcttcagaggaagcatctgggtctgtctccatgccagccccagcagtgatttcagccaagctagaggcaatcaagaactcacgtcgccgccagcgccagctcgagcagggactttccggtgcgaacaacgccgcggccccggtggctaacggcactgagcccgatgcagacgagctgcatgaggatatcatcgtccgctgggaacatgttgagcgctcattggcaaccacgcgtggttcccttcccccagctgagcttagacgtctccaaggaatctaccgtgagtttgtggccggccgaaatggcgagatgcccaacggcgaggctgccaatgagattggagggcgaacaagtctgatgtgatatattttatgacttgttttgtacactgtatatatgaacgcccttgtatgttcgattgattatttgccttctactcctgtatttatcaatattggtaaatggaaacgtccttatacatttgagtctcgtcttagaggattattagatgagaaagggatcaagtttatcgcaccgatgttggcttgcttgcggcaattcatgaagctttgccttgtagattgggttgctttacaaaagttgaagtactagtagcttagggaaagagaatatgaactagttatgttcaaagcggaccgcaagcagtcacagtatacataaacacctccacctcaccgtggtgccgtgggcggctaccgcctacgtgacccggcagcccatattaggaggaggcctggaagtaggggagactcacgggcaagctttttgccttgcccaatacggtttgtaggtagtcggctttctcggttatcatggatgtgtatattttgatttgttctctcttgctgtcctggagaaagctatatactctctcatcagcactaggggcttgtctgtctagccgacacaaagtccgtcacttctgttctaagccgcgagtcttgctcattatcttctgtctttccagacaatccaaaacagcccccagagtagctagtccaatcaccccacagcagccagtagcaatttgctttttccaggtattgggatcactgcagttctcagagcagacaggataggttccgtttgtagtcattttggcgcgtctggcatgatagctattttcagcagtccacatgtgagctgcgacggggcagcgcagaaaagacgaattcgtaaaagaggaggtgttgcatgggaattggttcatgtaaaggctggcgatagcggaatatcgtagaggtggcgaaactatttcggtccttgagagtcagagcttgaagtacatatgagccctggagaggcatcagactcaccatactgcgtgcacctcgtactgaaaaccagaccaagccccggagatattacctaaccaagctccaactgtacatcgatgaatcaacattgggaaccaaactataggtggaagagatgaaattaccagttgacgagctcgtacccggtggtcaaaggcaatctttattggatctgctattcttgacttcctctgcatggttcgggctgcagaaactatcgataaaggcgtttctgatagctttcggcaccaatccagggagcagaacttaaagccacgaggcctatatgtcatattgttaggaatcagaactgaagactaaaccagagagacacaagccttaccaatgggcagtcaactcctcctcgagcatcagcccccacactacagaaaccccccccttaccatcttcaccgaaagcactagcagaaagctcacccagaaaaaatccaagttcacttattggctagctgccgaactctggctccagccaagtcaccagcacaagcgacacccagggaccctatcagaatcaaaagtcagctgagtccaatccatcttagatagaacatgtgaagcgagaaagaagcgagaagaactgggatggaacttaaaccaagaaaacaaaggctggaagaggtaaaaattaagttaaatggacttaccaacgtcgccggcgcggcagaagactcggagcatcaccacggatcaagattggggcgggggtaggcttgccccggcgcgccgcaatcgagcccatgagcgcgcgagcctgctgtcgctgacggtgggcttcataccctgggatctgctggtaagtggggggaatcaccggaatcctaatgtcggcaaaccaggaggtcgcagcctgacggctgagcccgtagcgggggtaactacctgtctcgagagagacacaaacctcatcggtagaacgggaagtcggaggtccattctccatggaccagaggcccgacaaggaaaccatctcgaaggcatccattttgcaagttgttttggttatcaaattgcctttgtgtgcaatgaaaaagaaggagaaaggaagagggaaagtgaagaggaagtgaagggagaaagaaaaaagcagaagagaagagaaatgggatgggatgcgggctgtttacggcccaaagaggaagggtcgaccgacttcagagccgaaggggcgacaaagtatacaaatggcatcggctcgtagtcgctcctgccatctcatgcataagaggtgggggactattaagcacgcgggcactactgtcttgttatgggtctattcaattagggctggcggtgttgcagtttgatcgaattttgtagaataaacaaatggcttagagtatttcactctttctctagagccttatcaacaagacgttcaagcttgttccattcagcggagagaacagctttggtcttgctaggatcaatgccattggctttgaactcattgtgaacctgcagaaactgatttccaacaagcctcttgaagctaggcacggtgcagctctccgcttgggtgctagtaagttcggcgagaatgtaccatatcaagtagtgaaagttcagcttgaagtcatgaatctggacagggtctttggggtcaggttggaagccctcctgagaaataaaaacagtaagcctgactaggctccatgcatggatgtgtcggattggatgggctttgtcatagacaacaggatcaattcgcaggtatcgaatggcagcgtggatgaatgcccgggtgaatttaccagccgttagcagagatatgatgagcttgtcgcgcagagaagcatatggctgacgggtgagaggccatagcgcagtttcatggagcttgtgcatagcagcttctaatttctcgattgcgtctgctggctctgtgctggttgctgttgctttctgcatgagttctagggcttcacgctctgctgtctctagggaagtcatgtcttcaggtatagacaagaaccggtcttcaatggtatctgttcccatctggcactttgtgcactggcaatcaaagaagtagcgttctttcaattcgttgcgacggatatcgtatggtgtcgtggtgtcgatgtaggagatgaatatttgctcgccctttttgataggacgcatagctttgacgtatagttcttcaccatcaaatcccacagtggagttataggcgcagctgtggttgatcaggccggcatatggatgcatgtagaggccaatgcggtcatacatggaggtggtaaggttgaaggagttgagatcaagctatgatatagttagacaaaagtccgcgatgaaaggtgtaaggctaaaaccaattaccttggcagcataagaagcgatagttccttcatccacatccgtccctgagtaattcttgacagctcttgccgtcaggttaatcctatcaagctggccttggctctctgatatctcgttgatatgagtctccaagccatcaaagaccttgaactcttcagcgtcgtatttgctacgcgcagtgcgcagtactacacgtaggagagcacgggcattgttgggaagaaccataggcttgacttttttgaagatggggcattcaagagaatgcgcgaacttccagtccttagattgacatacctaaatcaaatattagaatatcaaaccagtaatctttggtaggacaagaaatatgagacagcaaacagtatatcgtatatcccattagcaactcacccgatcacaatacttcacgacacggcatcccgtgcaagcctttaactcatttccagtttctacctgtctctttccgaagcaaccagcacaagtgtcctctaaacgtggggaatcaagaaccgccacaaatggtgttttgatgtgcaaaacatcttcaccggggttgatgtcggctgtcgcaaacagaccgttacccaggccattgggggcaggctgtgggaccgttctggtcgttaccgaaggtagtgcaattcttgatgccattttaggtgatctgaatacaggaataagaatgtttgaagatataacaattagagtggatagtcgtccacacgggcagggcggtgaatattcgccattgtatttgaatatcttggcattaatagtggaagattaatagaatctccaacataccacaataaagagcagtcacatggaagacattgagatttcccttgtggttttactgcttgccaattcagcttaacagaagctagaaaccagctctatctttatatgcaaagtcgcgacatggtatgaatcgggcaaagaaatactcctacaaatccttttaagcagaaagccataccaatcaagatgaatatttggagccaaaaagaatcagattcgaggcgctatttaggtaaattactaggtggacatatagcatagctcattcaaagtgtataaacccagagactcaagtcccaataaattaaacatcaggcatgaaaagaacatgaaaagaaccaaactcaagacctagagcatagccgcaaaagcagcagcagcagcaacagcgcccaacggtgcagcagtgatcagaggcttggcagcagccgcagcaccagcagtagaagcagtaggagtaatcttcaccggtgtagtcgaacccgtcgcattagccttgaaagcgtagataccatcggtgacagtaagagggtgataaataaccgaatacgacgggatggattgtgtgctcgaggtggaatcggaaatggtgtgatcaccctcggaggcagtgtactcatacttccacgtgcaacgagcagattcagaaaggcgggtgaaactgcatgactcgactgcggtcgcttgagcagtcgcacccttggtcacgacagtcacttccagggagacgctgtaagtcgcatcgccctggatcagggttgcggggcggttcagtgcgcacttggatgcgcctgccatgcaggcgatctcataggtcgtggcgtacttgtcgatgccagcaactcgggctgcgatgctggagtaggcgccgatattggcgccgtagggattgtcaattccgaaatagctgacggttgttgtgctgggctcatcagcggtagtcagagccgctaggagagaaacgaggaaccaagatgagcgcatatttgcaggattcgaagatgagggatttcaaggttgtgagaatagagagaacagggttgggcagaagaaaaggagttaggaagcaggggaagtttttcacagtcactgttatgttagctcatgactagcgtgcccgatgggcctaaaaagagttacagagttccgcaagccaagcatcgctcgtatacaagcgctatacttggcacttggcactgacaagtaatttcgtttaagggctgtggtaaggaaccaaagacatatcggtacagatcttgagggcctatggttgtgacctacaagcatcagtcaagacctaggctatcttgaaggtgaagaagttcaaggtggcatttgaaggcaacaaaatgatggctcaaggacaatagaatagaagtcattagtcgcaaaggtcggcaaagattgctgtcacgaggacccgtggaccctatcaagccctttcaagtgagacatcaacgtccttctgattggcgcccacaggaggctcaagcccctcctagcctaaactaatattgtggctgagcccctggaaatgaataatgataggaccctgaatatagctatgcacaagtatggagtacggaaaatatctcaaaggtcaaattcgtataggatcggccgtagagcagagagtatagacgaggaacaattcgaagattcataaggaaaagacaatattccaatccgagtacaataattaaaaaaggccaaaaggacaatgcgcgccatctatcaacaagattgccctacccactacaccgtacaggaagtttgaatcctgtcctatattggaaaatcatgacgggaggacctggggaggccatatgggatatcgaggggaaaagagaggttgacttcctctctcttaatctcgacatggtggggttttttttctcttcttctgtcactgtgtgcaaaaaagagagatttacagtgccttgccgccgacaaagttggcccaggtgcggacctcggagggaattccttcggcgcggggcagcttctggctcatgcactgagcaaagagctgggcagtctgtagaggatcagttagcaagttgaataattatggagtatcagctctttgaacataccttaggctccatgaatagaggcacgctgaaatcgacagcgttgcgacgcatgacatagtcttcatcaagctgggtcttgccacgggtcttggcaaggttgaagcagccacggatgtcgtacttctggaacacttcacggagagcacgcttgtccttcttggggaactcaatcagcttcacggagacgtcattctgggcggtggactcgatgtgagccttgacttcggggttgacggcatagaacttgtagccaagagggtgcaggtagtcgacaatcctggtcaggtagggctggttggtatcaccgccgagcaagataccctcgccgggctcgggcacgcggaagttcatggtggactggagggaagaccagtatgcctcgatcagatccttaccgaagcaagcaatttcaccggtggaggacatctcgacgcccaggaaggggtcggcaccagccagacgggtccaggagaactggggaaccttggtagcgaggtagtcacgcttcaccttcatgaggtcgacgggctcggggacatcacggccgacgagagccttggtggcgacgtcgatgaagttggtacctaggaccttgctgacgaaggggaaggagcgagaggcgcgcaggttgcactcaataaccttgagcgcgggctcgccaccctcctggtcggccttgatgatctgcatgttgaaggggccagtaatgttccaggccttagcgaccttttcggcgatctccttgacgcgggccatgatgggctcctcaagggtagcggggggcaggacgagggtggcatcaccggagtgaacaccagcgggctcgacgtgctcggaaacagcgtggacaagcagcttaccgttggaagcgacggcatccacatcaatctcctcggcaccctcgatgaacttggtgatgacaacggggtgatcaggggaaacggcagcggcgttcaagagcttctccttgagctcatcgacaccgtagatgacgttcatggcggcaccggacagaacgtaactgggacgaaccaagacggggtaacccacagtgtcggcgaagacctcagcatcagcgacagaggtcagttccttccaggcgggctggtcaacaccaatgctatcgaggatagaggagaacttgtgacggtcctcggccttgtcaatgtccagagggttggtacccataatagtagcaccaccgctctcttgcaggcggagggcaatgttctgaggaagctgaccaccgacagagacaacgacaccgctagacgcctcgagctcgtagatatccatgacacgctcgtagctgagctcctcgaagtacagcttatcagcggtatcgaagtcagtggagtaggtctcggggttgtagttaatcataacggtcttcttgcccatctcacggagggagagagtagcgttaacagcgcaccaatcgaactcaacggagctaccaatacggtacacaccgctgccaagaatgataattccgtggtcatcgaaggtaacatcgtgggaggaagcgttataggtagtgtagaggtagttggtatcggcggggaactcggcagcaagggtatcgatcttcttaacccaaggagtgatgccgaaggacttacggcgagcacggacatcatcctcggtagatccaaccaggagagagatctgcttatcggagaaaccgagcttcttagccttcatcaggatctcctgcttgaggccgaagaggctgccgatttccttgagttcattgttgcaatccacaatgttctggatcttgtacaagaaccacttgtcgatctttgtcagctcgtgaaccttgtcaacggagtagttctcgtggagcatagcctggccaacagccaaccagcggcgatcagtggggttgcggagagtctcgtcaaggtcatcaaacttatcaccctggagaccaaggtattgagggtcaacctgacggatggccttctgcagggactcctcccaggtacggccaatagccataacctcgccgaccgacttcatggcggagccaatgtcgcggttaacgtgctggaacttgctcaaatcccagcggggaatcttggtgacaacatagtccagactgggctcgaagttggcagtggtggtcttagtaacggcattagggagctcgggaagagtatgtcccaacccgatcttagccgcggtataagcaagcgggtaaccggtggccttggaagccagggcggaggaacgcgaaagacgagcgttaacctcaatgacacggtagtcgagtccatcgggctgcagagcgtattggacattgcactcgccaacgacacccaagtgacggacaatcttaatagcagcagtgcggagcatgtggtactcctcatcagacagagtctgactaggggcaacaacgatactgtcaccggtatgaattccgagagggtcgaagttctccatgttgcaaacggtaatacagttgttggcagcgtcacggacaacctcgtactcaacctccttccagcccttaagggacttctcgaccagaatctggggagacagagacagagagcgcgaggacaagtcacggagctcatcggggttgttggcgaagccagaacccaggccaccgagggcgtaagcagaccgaacaatgatggggtatccaacctgctcggcagccttgagagcgtcctcgacagtctcgacagcggtcgattcagcaatgggaatatcgatctcgttcaaggcctgggcgaagaggtcacggtcctcactagtctccagggtcttgatgggggtgccgagaaccttgacaccgtagcgttcaaaggtgcccatgcggttcatctgcacacccaggttcagggcagtctgaccaccgaaggtgaggagaataccatcggggcgctcgcgctcaatgacgtgggtaacatattcgggggtgacggggaggtagtagacttcgtccgcaagcttgtggtcggtctggatggtcgcaatgttggggttgatcaggatcgagtggacgccagcttccttgagagccttgagtgcttgagagcctattttatcgcacagtcaaaagattagttacagttctcatttagattgatttttagcgatcatttttcaagctctctgtattccccacagaaaagcttctcgtgcagacgcaacccccatggggactgacagggcgatgtgatcgaaaatttcatctccaagtgattgcaacttaccagaataatcgaattctccagcttgtccaatgctcaaaccaccactgccaatgacgaggaccttcttgacatcgacgaggttgctacctgccgacacagcaccgctagcgagataagactcagcagccgggggcctctcagcagccaggcggttcaatgtgctagagaaagaacggagctgctgagaccgagccgtggggatcttctgcaggcgtagtgtggaggccgttgaacggacggactgagatgagaatgcgcgcagagaaagtgctggtcgggtttcagcaatgcagcgctggcgcagcagagcggccgcctgcccacatcgagcagcgagagccattgcgcaccgaaggtaatgtttcaattgctgagggatgtgttgaggatgagtctacactttgctgggattcttttttttccgcctcgaagtcgctaattggctcgttccgtccaccgtatacggctccacttttgaagaccaacgagggaaagccgggggatattggggattatataccagcgtagatcgggaggatctaataatgaatcttgataatttagtatgaagaggttgggttttatatttgcttcattattcccctttttttgtttattataatctctttttttttcagttggtggcgatgagtcaaacctggatgtggagacgatctctcggctatctttcttatactaaattgtatgccccggtgtatactaattaaagccttggtaattgtctattgccatagctacctttcatgtatatagaagatgtagagtgtataggcaattggagcttccaagaacatcatatccctccagacaatcttggaaatgccgatgccggacctcaaccctatctcttatctctcaacatcgagctacgatctcccaccacaaccctaattgacagtagattggctggaaaaaggcaaccttacatcggctgtgactggcgacacgatggcgctggtgctaatgttgtccgttctgacattgccgtcattaaaaacgaaaacttagatgcctctatggccattgcatttgcatgggataagcataccgaagttgatagcggtggatcctaaagattcactggaaaatgcatagcaaatataggaaggaagctgtcatttactggtataccattgttcagactagtggatatggcgagaagtacgagcctatcgatggttgctagagaatgggagtatatattgacaatacttgggtgccaaagataggctttgtacatatacagctctaactaataaccgagcatcatggataaagacgcgagagacatgaatgctatgagagatctatagatgttgttatactcatctttctgggtaaacccccaaccttggcgactgcttagccaatttacctcggatattactcgatagctttgctgcaattggtatactaggctgtatgtgcatttctagcagagatattgtagtgatatgtcctactcgtggagaatagaaagaatatacaaatgagatactctatatatattcagctcttactccctcatataccatccaatcgtgatactaaaaacaacccacagaattcacaggcgaacagaacaagctctataatagcaactactaccaagtaaactatcgcgctagaatggaattgagtatgtatgtatgagttcgattccatgatcctcttactccgtcggacaaaccccaacaacctcgagagctacaccaaaagaccaacgcacatagctggattacgctgtaatgagccgatagagtatatggtatattgtacatttaaaaaagctattatactacatacatcactgtacaattattccgcaacccctactctcccattcagacgtgaccaaggaccactcggttgtttctcaatccgagacccaccacccctcgacatcccctttggagagcgagtttcggaggcccagaaatccgacccatctcggttctgccgaccctccagcatgacctcatcgaggtcctgattgagcgttttacatacttcagccaaggtttgtcgggcgtcctgcgcaacctcattacctaatgcgatcttttgctgaacaaactcctttccgttggcagctgcagcattagaggcaaatgcccatgcctcagcaagaccaacgacctcatccggggtctgctcggaggtctgtgtctggattcgcgagccaagagtaggagtatgcttaaagcgcggctggcgggcgagaatggggtattcggggagtaggtgggattcatcgctcagacgattgagggcgcgaagggtcgtggatttttcctttgacagtaacccggatagataggatctctggagagccagcgacttctgactcttatatagcgggaccagggtttcgtttgtgtataacagaacgtcgattgggttaggaggtggcatttctgctgtggaaagttcgattttgttggttgttcgtgacggaggcttctgggtcaaattgactggctgacaagctctggacgcggcgtcgaggagatctcgccgggcttgtagatatgcggcatattgctctgcaatctgtatcttgcgattctctagccctcgctgggcctcctcgatgtcctccggaggaagctcttggagcagactctcatctggatccccttgaccaaccagccgttcctccacccattgtactagctcatcccgggtcctttgtaatgcctgtgctttggtatctgcagtctcggcttggggatcatgctgtgccttggctttctcaaataattgcttctggcggtccaattgagccctcgcgcagacaactgctctctcgaggctatgcactagttcatccaagcccgtttcagtgtcattgcgcccgacctccgcatctgcctccggcaacagaatttgctcgctattattgccaacgtcctccacgctccccgaatcgcgggttctaatctcttcaagataattctgaaacacctgcagcttggtatggcggcgtcgatcgcgtaggagagcaaggtattcgcgaagttcggtgccgggctcttgcatatcagcatcgtcagaaggggctttcggggccgtccgctggcgccttaaagaggcgacatcctcagacgccaaggcgaactctttgcgggcggcaacattggctgccaatgccttgagataatcctttctcagcccaggaagatcggcagggatgcgtttgacattggtaacggcatcggtcgacgcgcacagggagaggtgggattgagcaagatcgcttgactgatcgttgaattcgataaatgagcgaagataagacgtcagtgcctggcggatatgaagggtttcctggcgcgatctgacgtaaggagcaagtggtttcaggatgtgtggaatgtgggtagcgtcaggagcgttggatcgggccatggtttcattaagtgagggtttgaagcgacaagcttggatatctggagagtcaaccttagaagccgagaccctgacaggtcttggaagacttcactgccacaatacacaatgcacaatccacagcgatctcgtgagatcgaagttgtttacctctttcacggcgggctgttggcaggcttatgtaacatgcagatcgtctcccgggccagtgccgcagtggagtttattgttttgcaagtccagcatctataatatgatgggtatgacgttcaggaaccggcaggagcttaaagacgccgatcaacaatgtattggcccttgggtcgattattgctcgatttattggacagctctaattgagacatccaatatgccgcaaagtgggcctgagcaccatgtctgttctgtacaatccccgttcatttggatgtttgccagtagattaacatatatattcatggaatgtgccatgagacacctatccgacagtcattgtagcgtatcgatctttttcgcaagacaaatagtgtgaatgttcatccaatatgtctggaatgccatgttatctagagctacggagtacaacgtaggtacatgtacatgtacgtacatacatccagtagatgcagattacgggcacggcccaatcaaagcgacaaaggataagacatctcacggcaagagagaagcccaacttttcggatttctctcttgcctttctcgattcctttccctgaaggagcaggcctttgaccccctccataactggtatgtttcaagaatatccctggaattgcatcaaggggtgttttgatctaattctggactaggatctgactgttcctgattattgtctcaaggctgaaacatttatacttcagtccttgcgacttacatgctgactgcgagtgcgggaaagcaaacttaacgtttagcaatatcatcagaacatacctgacagccatggctcctgacttgagcgctgcttccgactctactatggcacaacctcctgcagcaacgacggcacccgctatggcatcgcaggctccaacatcccgacaaccagtacacagttcccatacttctgtaacacttccgcccccaggaagcccaccgcttggaacgggggattatggcatcacaaggaccgctcagggtaagtcgccagtggcaggcgtcactttgatgagctccccgactaacagaacaagggccactgcgtcatcctcagccgctgacgccttcggatctccatctagtgcttgagaaagagcaagaagcgattgtaagtgggatcccagagcgccaaaagtatatctacccctcaactgctgacgcgtcaaaactctccgcaggtgaatcgattgactcgagagctatctattcttcgccagcagacagcatctgttgcatcgacgacatcctccacgtcaacttttaacgaggcagatggtgcgcgggcatcacccgccctcagcagttcaaccccatctcactccgcgcgacgaaaccgatccaattcgagtctcagttcacatacttcagcaagccagggccagcagtctgcaagtgtcactggaattgctccctcgcgggatattcaatatcgcccggaccattctcgaacggttcgcagtcgcgagccatccctcacctctcgccgaccctctatggggtcactatcctcattccctcacaacagcaacatatacccacaacggagctcggtctcacagacccagcaaggccattcacccggaaactccctgtcgcggtttgaggaggctgcacatcacaagttggaagtggaatacatgaagcgggagaatgagcagctgaggaggcgggtccgagatctggagcagactttgaagaggcaaaaggaagattcggccagtgaggcttctgccacaccatctgagagaatcattgaggcctgattttcaatttccactccaacccatatcattctttcgcattgcgcaacatttttatcttaggtttgcaggcaaacacattcatcgaaattataaaactgacatgtgaaaagcaatttcaggcagccccattgaagaccatgtagtccaatgaaacaaacactacggagtagaagaaaccagaacgaaattaactacgtgaggcggtgcaacagccccgccatacgtcaccacgtcaccttgtggcgcagtggcccccttagataaatagtcgcatcccaccagggaatgatgagatgtttagattccttcgcaagattcttcctttatcctctacctaacatcatggctaattccactgtccacgtttctggcatctcgtcaacaacctccgagaaggaggttcgcgacttcttcagcttctggtacattattacaatgattttttttatttgaccaagtgctaacataaaacagcggaaagattgtcaccctctccatcaccccagtctctggggaggccgatgctccgaagtccgccactgtgacgttcgaaaaggaggcgtaagctaccccgcacccagtttcagcccgcaatcagcccacatcaacacaaactaacgcaatttctaaaacagcgcagccaagactgccctcctcctagaccagacccaactgggcacttctgccgttcacgttgaagcaacccacaacatcgaagaaataggcggatcccatgtcaccgacgcggagaccgaggcccgggaagaggagcacatcgcgcaagaagacaagccccgatcgcgcatcgtcgcagagtacctggcgcacgggtacgtagtgagcgacaatgccatcatgaaggcgatcgcgctggacaagaagcacggtgtctcgcaccgcttcacgaccgcgctcaccaacttcgataagaagtacaatgccaccgagcgcgccaagggcatcgataacgactatcagatctccactaaggcagccaatggctggcgcggcctgagctcgtacttcgagaaggccctggagtccccctctggccagaagctgcgcgacttttatgttcagaccgataagcaggtgcgcgatatccacgccgaggcccgtcgtctggcggatttgaagcagggtaagactgaggctgctgccgctgcccctggccctgctgctgttgctgagcctgctactgagcccgctgctcagcccgctgctgttccttctcagcccgaggctgctgctgcgcctgttgagaagtcctaagggattattggaatgagatcttaaattaatgtggagatgaagatttgcgctgggcgtgtttcctttgtgtctattactttatcctttccattattacgatgtcatgtcatgccgtgtcaatagtttatttttctttctgataaccgattttagggctctttctatacacgtgagcctttgataactatggtctccaataagcaaagcaaattaacatgaagattgatttcaagtcagaggtttaatgtattgttttactaagtacattactcaaatgaagagattatttgagcttattcttcatgatgtcattatccgaaattcaaaaacaggaccttccaaatccacaagagataccccatctcaatggtgtttatcgttggcatatttcgccgcctcgatcttctctagccggggttcggggttgctcgtcatcacagtgtccctatattcctccgacgataacacgggttctggttgcttgccgacattggtcttgccggagccggggatatcctgctgctgggcgccggattggcgctccggagaaggggattgacggccgggtaagggagcagacattattgtggatattgtagaagttttttaatgtgctgaagagagggataagtgtgagtttcttaactgaagaagggaaatggaactcatgagatatggcgatcttgacagtactgaccttcaagtgatgtaggcttgtaatggatgaagatgttgagtatgtgtgtttgaacagtagagtctaaggaatagtgcttcttttattttatcctggaaaccaactgacgttaccaactaaaccggtcattgattgggggtcatcatgatgacgttgagtagcacttggaacaaggcctacaacatacaactaccacaagacgatcctacaacttactaacggtatatacttaagtatccttattgtagttatagtacggagtagtctgtgccgccatagatccttactatgggctacttctgacttctttgctctagaaccaaaaccatcacttctttaagcgttgtttcatctcagtaaaacttgtttgtgccatgaatatattcacgttgacttcaagagcaagccgtgcgcgacgacgtcggaatccgacaatgcctcgaggatacaggtcccaccgacaatatggataatgctcctgagccatgacgtcacttgtcacgatctttgttttgacctcacctttttccttccatactcctacacgagtaatcttagaatattcttataacaatctggattcagttccgagtccactaggtggctggtttcgacggcactacaggttccagagctggaatccatcattcgtagcatggctgatgtactatatcatgaggaaacaagggtgtcttcaggggaatctgtgcatcgaagaggattagaaaggggaagagggggaataccctcgagcagaatgtccacaggtaggacttttaagagtacatcagcgagagcatcacatgaaaaagacgtgaggaaagaaaacacggagatacagagcagacgggacatgatctaaagaagcgggaaagacatgaaatgggcatatggtctcgtgaggaaaatgtggaaggaggaaagaaaaatcgtccgaggcattggaaattcgaatccttttttgtttttctcaatccatctcggttatagtctcttagttgccgttggcctgcatgcccgctgcggcagcggcttctgcgttggcggcggcgaccatggccttggcatcggcttcgtggaagacgccttgtatgacctgctgctcttcgtgaccaagaaccttggtcagactctcgtagagctggggctgttcttgttggaggcctgaaatcgaggttagctggtgataggatactctcttatatgtcacttactcaacaggacatgcttgaacatgccatatggctccaatttgtccagaggggtctctagaaggctttcctcgtccatgtcatcatcgtcatcatcggtgtaggagccgaatttttgagcttcctggttgaggaagtcgagataagcagcactctcgtcgtgaacatcaccctcttcaagagctgcttcaacctcgttttcgtcccactcaacatctccatcccagtcattgtcttcgtcgtcttcatcatcctcgtcatcgagggtgaagtcggactccttggtagcatcctcgcgttctggataaattcttagccttggggaaacacgacgggatacttggagaaacatacgcttgagagcagcaggcagggtctggaagagtcttgtcacaccctgcaacagtcttggccatccctgctggacactgaccggaacatcggcagccttcaaagtaagcagtgagctgattgcggcaattgacagctttttgtcgtgtacacgtctgaagttgtcaatgttagcgaaccaagtgctgaagaatttgtttgtccagcccttagcctccataacctgcagactaagagctgggttgtagtaaatggcgttaatgaccatctccatcaagtggatgcggtacgacttggtgcttgcctcgccagcatcgataacccgcatagccatctcaatgaacatggggatgtactggtcaatgtgaccccgaaggttgagcatcagggtctcagcaagcttgcatccgcagatgcggtcaacgccaccaacctgttcgtcagaaaagatgtcctgcaccataccaaccatagcgtccaagtaagctgggttctgaactagcatatcggagccataagcgacatagttgtcaagggcgggaagcatgtctgtacgcagaaaagttaataaaacatcaaaaccgcgtgaatttatgtgaacttcaccttcgagatacagctcagcaccagccttgaaggtcttgtggatcagctcgaaagcttgccacatagatggggaaatggtcttggatgcgaatgtgcagctgtcaatgatctcgaaaatttcgttatagagatctaaaatagccagttagagccgcgcatacgcttgatatattgacaaacttaccataaagcttgttctctagggtgatgctgatgacgggcatcaagatagtctcgaggtgcaaaagcacgtcaggggtgctctcgagtgtgagaatgagggtgccgatggtctgtaacacacccagagcggttatgctcttgtcatccaagaaatcgccgtagccatcttcgtcaccacccttggaggcattgcgttccaagagctcaccaacaatacgcatgtatgtatcgcggagctgctcgctcaacgctacagcgaagggagtaagctcggcagagaatacctcaacaaagtcctccatgacgttggctagagcatccacgtcgacctcattggccaacttgagaagctgctgcataatctggggaatgttctgctgcatcgaggtacggatgacatcgtgacggataaggggctgcagagcaagggcagcctcaactcgcacgggaagttcggaatcggtcatggactccaggatgtttcgatagataaccatgaggttgttagggtccttgaagtcgagctgctcgaacttctccagggtgtcgcaagcacgagcacggaggaagccatggggactgcggaattcggggaaaacatgacggacgaagaagtattcgacctggtcagcaatcgggctcttcttgcccaggataacggaagcaagcgagccaatcattctcaaagcgccctccttctccctgggctgcttctgatcatccggcgcagactcatatttgctaacaacactgtttacgaatgtaagaattgagaaggtctgcttcttgcggttcttggtaagggaaaccaagaagtttgtggcggcaacatcaggagcggaaacctcctcatagaagttcaacttgcggtggagatactcagatgggtcatcttcgaaaagctcaatatcctcgtcggattggcacaagatagggaaaacgaagtgggcaatcaggttatccatgtgcggcttcaagtggtcccacatggcctttggcttgacacactcctccataaagaccaaagtatacgaaagtgcggagttgctgagccattgtgtcttggacacccacttgtcaatctccgtcaggtatcccttgagaatttcgggggcgaaagtgctgataaaggtcttggcatacggtgtgtagtcgggggtagaggatttcgtgatcgtggtagggttgccatatctgatgaataggcggttcaagttggcatatgaccacttcttgcacttccaccagtggttcatctccctctcctccttcgagtctgccattgagctggcagggggtgtcttcgagacaatgcgcaagaatagtgtacaccagtccacagtcgcttggtgggtctgtaggcatggagaaagctcgaactaaaatcgcaatcagtcagtataaataacctagccccgcgcagactagaatcagggtaactgacataaattgcgtgcttgaaagccttcactacaatacgaagcatctccgcagcctccagactttcctcatcaacaagcttcgatccgatgctgaggagctgtgggaatgacagctccacgatcttatcaaactcctctctcttctcgccagccttaaacctgtaaacccggcagactgccaaaagacactgcagacccgcatagaccgtactcgcatcattggtgctgagaagctgcagagtaagatccaaaaaacccggccactgctcggggaagtcgttttggagaatcttctgcaggaggggaaccagttgattgcggacgttgggaggagtcgaagccagagcagggataagtctctccctgaaactaggcttctcgatttcgggaatcggcgtacgctgcgggctatcttcgacgggggcccacccacgggtaatacggttcttcaggtaaacaccagctataagagtgagcgggtcagcaagggacagcatttcctttgccaactaatatagacaccaaacttaccagagagctggactgcattgttctgctcgccctgcaagatatccaagagtccattgataaatccgggttgtgtctcggcctagatatatcaaccacgtgtgagtctgacgtccggtgccccgccagtcgatccagcacgtacatatttcaaatcaagctccgcttgccggcgtatatccgcattcgcgtctagagtagactgaacacgatctcggagggctgtgacatccatcgcgcaacaatcccccaacaccagaaagtcaaaaaatctccaaatacactgagaaccccggggggagacgcggaccggcgctaatggaagacgggcgaggaaaaaaagtcaagaattgtaaggacgtgagtgtccttgaagagatcggtctggatcttgaagacaaggtgagagaagatgttgttcttcaagaggagggggattttttttcgattttcccgactctcgggaggcggtcgccccgcagctaatcagaggccgcacacacggattttgtaagaactatgaactacctagatgtgggctattgtgagcttggataaacactgagggttgatttattgctctctctaaaacattacaggggtttattattgatttatatagagtttgatggtttcgtattcattccttcatcttgattacatacattgcggaatccatcagtggaggagaggttcatgactacccaatagggccgcaggcatataccccctaaggattgggtatcttcacatgtaaagagaggccgcgaagatgacatcgcgcttgatcaactcctgagcttgctgcatcttagtgtaaagtgtcgggtctccgaccagtttggccgcattcttcacttcgcgacaagtctcgtccagtcgggtgatcacccgaacaatagtaccctccattacgtccgtgaggtcagtgatgcgattgaaagacattcccttggcccactcataaacaacttcagcgagaccgaagcgtggcttactagcgaagtcgttggaatcttcactagattgaatgacctggtgcagaatctggaaatcattcactttctcggcgatacgaatgatctccttctggcccttctccagacgtggagtgagggtgggagtgctgtctgtcttttcctggaacacaaatgcagagaggagtgcaacaatctcctccggctcgtattcagcaagaacgttctcgagaaccaattcggttaagaccaactcgtcggcggagtgaatttcgcatgccaccttgcccttcagttgtacacgagattgttcgtcaacaaagccgagctccctcagtacgtgaatgcgctgctcataatccggaagtagttggaggttttggtcggacatcagctgcttcaactccgagatgttttctttaacttgccactcgtcgtgttgcatttcgaactatatggcattagtatggggttcagatcaataggaatgagatactcacatggtttacgaaatcaggacattgtagacagtggcatgactgggcaatctctgcctgaacttgtcgtttgtcgaggatatcgcggatttccatttctttgatacgttgccagtcgatctcgtcccaggccgtatcgatccaagagttggtgaactggcatagttctgtttctgcccacttcatagactctatttctgaattagtattttcgtaaccgtatgttcaagaagacagtatgaacttacccttcttaatattcagataccacattggttttgtgattttaacctgggtgtttgtcacgcactcgagatcggataacggaatcttgcacactcgaaggctcatgtcatctacacgattggggagtggttggaagtagggtctgaataaaggtaagaatggaagaatgtcagtggggtgccgcttgctactcaaggttccaatctcaagtacttgaatacagggcacggccccaatgactccgggagaaactccgtcgcgcgtaataacaccagcagtacggagtccatcctgtgtttcacgttagctttaaaccaaatatgtattatatcgcaacagaacacgagcactcaccttgcggtacacaaccaacctcttcattgtgaaaagacgtttgccgacaggcgatgatagcagttcggtgtggaactcagctgtgagctttcgatactccatggcggcgttatggcaggtcaatagatccaaatcacagatctcacatggtgcccgtttgattttcgcaagactggcctcagatacctggacttgcttctcgtgttctggtaagagggcttgtgttgcgttttcactgaaactccgcttgatcatttcctcgatcttcagggcttccacacgcaacagatttagtatcatgttgtatgtgagtcggaattgagatctgagctttgtcggatctccaagaatcatctgtttcaacgaggcagcagatggggcctcgtcttttccactgtttgtcacgatgacatatcccaccgtgtcaagacctctacgaccagcacgtccagccatttgcgtatattcgccgggcaggagatcacggaagcttttgccgtcgtgcttgcggaacccggagaataccacagttcgggtgggaagattcaagcccatcgcgaaggtctctgtggcgaacagaaccttgaccagagacctagcgaagagaatctcaacaacttccttcatgatgggcaggagaccaccatggtgtacagcaatgcctctgcttaatagctcgcgcaggcgaaggatttgcggcagcgtacggtcctcgggctttaatcgagtgagtgacttttcaatgaacatgtgtgtcaaactcttctcgttggcattgctgaagtcttggtttgaaagtgaatctgcgttctcctcgcatcgtttcttagagaaaacgaagacacatcccggcagcaagtcttctttgcgaagatgcgaaacaagatgcacccaagtgtttttgtcctgggccgcacttgtacgaccaccaccacggcctgtacgagcgatgttacccgtgcctcggttggagtactgtccaccgctctgtcctcgacctcgttgcgggcctccacgctgtgggccgccgcggccgcctctgttattcgctggctgaccgcggcctcggccctggggagctggtgctctagcttgcgccgactgcgcctgagcttcagcctccttcttagctttggccttatctttgccggacaggatatcatccgcttccttccagccactctcaaggaatcttttgttggagtcgacgatcttgtgcttgctcttcccggcccagagatagtgctccagcgggacaggtcgcttatgggttgaaattacataaatgtccttcttctttgtacggcccacccaggatgcaaactcccgagtattgggaacagtggcagagagaagaatcaacgtgacatgctcgggaagcataatgatgacttcttcccataccactcctcgttcgaggtcgttcacataatgcacctcatcaaaaatgacgaattcaacgtcccggatgagatcagcacctcggtacagcatacttcgcaagatctcagtggtcataatgagacagctcgcttccgggttgatttgaacatcaccagtcagaatgccgacatcgtcgaattcggttctgaaatcacggtatttctggttgctcagcgctttgatgggagaagtatagattgctttggtcatatgcttagcagccaaggcgattgcatattcagccacaactgtcttgcctgccgaggtatgggctgcaacaaacaccgaatcgccattttcgaggtggtaaacagcctccttttggaaagtgtcgagctcgaatggccactctctggccatatctggaaccaactcattgaagttgggaatatccttgttgacatcgacaacgtgggcccattctctacctttttgcttgacacctgcaagcaactggctacgcggctccaacgccgggaactcaactggtagcaaagcgtcaatatcttcttcttcttcatcgtcgctgatatcatcaagctcgacctctgctcctaattcgacatccgcagattcctcgggttgatccaccttcaggtcactttcctcttggagaagggcggtttcgacttcttgggcaccttcggtggcggctttagattttgcttcatcgaaatcgataccgttatcgaagccagggggtgttgtcagaagacctccctcggtgccaaagttgatgatgcgatcgagtccagattgtttccccttggtcgattgttctgtgacctgagcatcggcctccattgctgccaaggcctcgatagcgtccaagcctccgggtgcgaacggaaagaaacctgcggcacctctgacaaagtcggcacgaccagcaggtcggcggagaagcgaggtggaattcttggccgttgcgcttgcagcaggaaccgtgacttcttgatatccagtgacgcgtccttccagtccctctcgtgtaaatcgcgttactgtccgtgtttgtgttggcgcgagttcgaaaaggtctgcatagtctgtcgaaacgtcccatcgtctgccaaagccgttaaaagctgccccgcgaatgaaaccaagatacttacttacttttggagagagttcaaccatttagtgctgaattggtccgatggggtcagaaactcattttcgagctctgttagcaactcttgcgcactctgaggggcctgcttccgagcttggaagttctcgatcttgccatcctcttcgtctgcgagacgagcatcgaaggtcgcggggtcgaagtgtctgccttctatgtctagctccttcattgtggaatcgagcgagtcggccatggtgtaggcaatgtatcggagagataagtaaaattatgtcgatgtttgactcggcagtagccgaaccccacaccgatatctgtatggatttcaagttctggcgcaaacacgggagtaattgtattccgacgtaaaaagaacaaatttaacgaatgaaattgattatgcgggtgagtgcgatagagtatttcgaagtgctttcaggcaacattatgtagcaataggctacttggggtaaacctcgctgagagaaactcaaggcggtgtagtccggcagtatccatgacgtcgatgcccaggtgtggggttatcgcatttagggctatgtgtactagtaatacttggccgcccatgcgggctctgcctttaataatccgatctatttagccgaagacgatatcaagcgcgttacatgtaagatcatacgatgtagcaatacctatactcgtgtcaggtttcgttttgggccgcaggccgctgtaacttcattgatcaagacaaccagcagccttcagccaggcaaagaaaagactgcagggtgaagacaaaaagaaatttacttatcatactgattccattgttatagctaactatttagtcctaaatccacctctcttatttttcgactcgttctgaggaagcacgatttggaagaatttcttgacatttttaacagcatacagctatattttcgagaatggcgatcaacaatcattttgatgagcgagttctgggttggcatccggatatagccggataaaatggccttttcttcaatttggacaagattgtattggcagaaaatatcaatatatatttaactttttgtacttcaatcagtcatacgaagaattgtgaatgaaagatgcaacaaataaaagggatagggatgaaatgatgtacgcccctaagcgccagaagggtatgtagtgtgagaacgattccatatgagaaaaggattagcacaacaagaatgagtcctgacaaggaatggcaatgaatcccttttttaaagtgaagactgtagatcatcctggtttagcagcaggtccgtcgttcgaagagattccggacctttgtgaaatctgcatgatcatgatcagaagaaaaaaacaagaaagaaaatcacagaaaagtaaatgagactcgatgatgttagataaataattcccagtaacgccaggcatggaaatttaacggcaagagaatttaggaaatgttttccgatcgtgaatgttcagtgagaattcgaaaattccctccagtgttgcgatgtacctgaaaaaaaaaattagtttaagcccgcaaggttgctgcattgcacactcacaatgtgcgtccatcagcgccccagccaactccagcagtagaatctggctcctcggcgccgcacccatgcattgaatttcgatcagggaggtcattgataatgtttctgatccagcggggagaatgtgtctgttcaaatccgagaagctgttggcgatgccgttgttccctctcaaaggagcggttgtgtacctcattagcaatctggcgctggcgccgaagtcgctcagcagcgacattggcacgaatctcatatgtggtgagacgtggattatcatatcttctttctgctccggtttgtggtcgttcgatgcgccggggaatggagcttgatcgctggggtcgatggttcaaaccattcgtatctagacttggattagaagatccagtcgcttcagctggaatgctagtttcgttgttggtcgtttcaggattggcagtaccccgatagatcatttctgatctgaggggtgtaagctctgaatgcgaggtggaataactcagggtgatgtctgattggcgatcatggtgagaggacgatgcttccgaaggtcgacgacttccttgagataccaccaccgagctctggcgtcttggattggatacagtgcggcccaaatggctatctcgggagacatcagaagaatcatagcgatgcaagggcgaagtaggacgatgggtgcgagtggcaccatccgtggaaccatgattttgcggccgagccactagttgaggtggaaggcctgccctagccgggcgctctaatcgttcagtaagtccttcttccagccgtgatgtccagcgtgccgtgttcaaaaactccataatcagcctttctctctcgctaagatcttgaatcaaagactcccgcagagacgaacgctccgtttgctctccattccgttcaatcgaaaaatcttcgttttcgagtctcactcgtggtggagtctccagaatatcgtctcctagcgggtgtcgttcgaggttctctgttgaaaagtccgtgtacacttcctgcaattgtggatcattagaatctaaatggaggatttgtctgcgcataaaatgttggcgaacgtcggccacaccagctctaccgtgaccctccagccatacaagaaggtcccatggttcgggcgaaaaggccatgcaacgaacggcaccgccctcggtgcatgatcttgatgccgggaattgacaaagaatagcagagtcgtcttcagagtcgccaaacttgtatatggactcaacgtcgataatagtgatgattccagattgagatccgatggcacacaagctgcttgacggggagaaagcgacggtgaagcagcacgcatcatccgcccgcaggccaatgttcatctccaggcgattgataagttcccattcccacccggtgagcttctttccagattcagttgtcccagaagattccaaatcacgagtgatttcataaaagtaggcgtgattctcatcccctactgccgtgagcagtttagagtccggggagattgtcgcatagttcatacaagtcggatgatgaaggaccgtcaagactttcgcgcgagtcaacgaatacaccgtgactgttcgatcattattgctattcatctgagtcagcatgatcaacgaaaccacaacccaactttccgaccagcgcccacctcagaaccacgatatcttcatccgccaagtcctcgctaccaccatagaaacgatggatggtcactgaattgacaatgctcccaccgaacccatggagctctacttcgggggataatcggctgcttcgatagcgggttgaagcagattcggcattgaaatcacccggagctatgcttgacggtggatcgagatcgagtgggagcgcactatctacatcggcatggaagggtgtatctccatggacctgcattccgcgatcaccgatgcgaatgaaagcacattcgccattttccgggccccccactactatccaaccatacccggcaaccagacagcgcggctcaaatgggagtaccgctacactctcgcgcttttgtgccgatatgtgtattgaatagacgattctctcgacgacgacataaatgcgatcgggatcagcagtactaatgtagttgcgaagctgtgtgtgactaaaacagagctctcttgggttaggctgcgcacggaagataagcgggttgatcaacgaacaagttggggatcttgaacgggaagaagcgtcgcttggtcggaaggatgagagcctcggttgggcgatgtctaagacagccacgttagaattattccggtagtgagatgcaccaggccttacagcagcgtagaatccgaggtcatggtggatagagctaagccagagataacattgtttgagcggggaagttaggaagacaagagaaacggggcccccgttggagtatgtcaacttgacagttatttaggcagcggacaccttgttttgtttcttcttagataaatttccttttggatagtctgtgctctgcagtgttcagtgtcaaactgcccggtgctttcattggatgacgtaatacttgggactgggacaaaaagccggggaaccgcaaattccaacgaatgcggtttgattgtcaccccgaaaccggccttgatcattcatgatgatgcattacactgtttatatctttttgcttactttaaagatcctatatactccatggtgcatagtgcataacatatacgtgttgcccccagtcccaacgatctgggccaggcattgtttccccccaaagtacggagtacatgaattgtcattgaccatctagatctaggcggactttcagctccattttcaatcttgtctcaggttcagccgaatcaacgaagcggagtttgccgactaggtcacacgacaccttgagagtatgactggttcagctactggagatacacgattttcgcaagtgttatgaggaagaaatgcttattgcgaccattctgtatggtatttgcaccaggccgtatacaatatggacctcgggagttcctcggagctcttcaatatttgccacacggcggaatgatgccattgaactgccactcctccgtactactacttgagatatcaggcagagtatgccgcatacatgattactatgtgctccgtaggctctactcgcaatacatccctatatccctaccctaatatccctacatcctatggcaatagccctatatccctatcctaatccaatacacctatgtcattgtatacccgcatatacggcaccaggcggtgagctcggttacctaggaggccatcgacaacaaggccatctctgattggtccgatcccgtgattctaccaagttcgacgggccgaagctctccgtgcaatttctatttccttcttcctttctcttcgattccatctctctatcttcatctcttcaatcgcatcttctgtccttttaatacttcacgattgaatcgctggagtttctctttttctctttttattaattaatttatcatcacaatgcttcctcgcacaattactcgcgcagtaagcttgcccttcttcccgaacaatcagcgcgtcacaggttactgactcaactctctctcagctcccgcgcgctgctttcgctcgcactcctgcctccagactcccagcctcattccggagatggaactccacagagggtggtgaggagaaggtaaagggccaggtcattggtattgatcttggtaagtactggcgcgagatgaaaatcatcaatgacgacagtattttaactttttattttcttaattataggtaccaccaactctgccgtggctgttatggagggcaagtcccctaagatcatcgagaacgctgaaggtatgtgagaagaaatttcaactccggacaagtggtcagagcttcggaactcagacttgcatccaccgtatgatgggcttaaatggaattagcaactaactcaactcttcaacaggtgctcgcactactccttccgttgttggttttgcacaggatggtgagcgcttggtcggtattgccgccaaacgtcaggccgttgtcaaccccgagaacactctgttcgctaccaagcgtctgattggtcgcaagtacaccgatgtcgaggttcagcgtgacattaaggaggttccctacaagatcgtccagcacagcaacggtgacgcctgggttgaggcccgtggccagaagtactctccttcccaggttggtggcttcgtccttaacaagatgaaggagaccgccgaggcctacctcggcaagcccgttaagaacgccgttgttactgttcccgcatacttcaacgactctcagcgtcaggctaccaaggatgctggtcagattgccggcctgaacgttctccgtgtcgtgaacgagcctaccgctgctgcccttgcctacggtatggagaaggaggctgaccgtgttgtcgctgtctacgatcttggtggtggtaccttcgatatctccgtcctcgagatccagaagggtgtcttcgaggtcaagtctaccaacggtgacactcaccttggtggtgaggatttcgatatccacctcgtccgcaacatcgttgccgagttcaagaaggagaccggtgtcgaccttaccggcgaccgtatggccatccagcgtatccgtgaggccgccgagaaggccaagatcgagctgtcctcttccctccagactgagatcaggtaagcatttccaattttggaacatcttagtaggccagtaactaattagtaatttttcgcacagtcttcctttcatcactgccggcgccagcggtgctttgcacattacccagaagctgacccgttctcagctcgaggctctggtcgagccccttatcagccgtactactgagcccgtccgcaaggccctgaaggatgccaacctccagtctggtgacattcaggatatcatcctggtcggtggtatgacccgtatgcccaaggtcactgagtccgtcaaggccctattcggccgtgagccctccaagtccgtcaaccctgatgaggctgttgccatcggtgccgctatccagggtgccgtcctggctggtgaggtcactgacgtcctcctgctcgatgtcactcctctttccctcggtatcgagaccctcggcggtgtcttcacccgtctgatcaaccgcaacactaccatccccaccaagaagtctcagaccttctccaccgctgctgacatgcagaccgctgtcgagatcaaggtctaccagggtgagcgtgagctcgtccgtgacaacaagatgctgggcaacttccagcttgttggcattcctcccgctcaccgcggtgtcccccagatcgaggtcaccttcgacattgacgctgactccattgtccacgtcaacgccaaggataagtctaccaacaaggaccagtctatcaccattgcctccggctccggtctttctgacgccgagattcagtccatggttgaggagtccgagaagtacgccgagactgataaggagcgcaaggccgccattgaggccgccaaccgcgccgacagcgtcctgaacgataccgagaaggccctcaaggacttcgaggaccgtcttgacaaggctgaggccgagaccatcaaggagaagatcgccactctccgtgagttcgttgtcaagagccagtctggcgagagcaccaccactgctgaggagctcaaggagaaggtcgacgacctccagactgccagcttgaccctgttcgacaagatgcacaaggccaacaacgagcagcagcagcagcagcagggtggtgagcagcagggtgagaccaagcagtaaatgcttttctttctatgactgccacacctgaaccgcacatggttactgtatttttctatcttcccttatgtttttcctttttttcagagactccctgatttttgcatctccttcctcgcatctacctgtacacatactttcaaggccctttttacccctttgcgttttctggtgtatcggtgttcaatctaccacacccatgtatgatcctatattcttttctcttctgcccttgtgtcactgttcaggttatcgcctggaggtggtcatctcggggttgtctacaattgtatctaatgacattacggcagtggggccacaaaaaaggatgtggtaggctttggttttcatgggcatgtgacaatagaaatcggacaattctcctctcgcttcacaatcattttccaactgtaggtctagttgcatcaatgctatcaacgtgcagtgcagatgtagttctcacctatctgcgagtgacacgcgccgttgggacatttgctcgcggatgcagagttgcttccggcttattattagtttccaactcaacatacatatgcatgtaggtacttgaccacaggcaaacaacactgctagaatctctatgctgcactctgcatgtacgccgatttatctggttaaagatgacataatgagcgttatattaagacaacactacggagtaactatggagtacgatatctttggatatctttcctccatgtttcagctcccacaaaaacgatgaagagtatttcccacggaataatggatatacatgctcggaaatataaccaaagcagcaaccaataaaagcaacggccaagctgaccatgattacgatgtacatagcagtgactattattgtccgaaatacactttaacgcatttaataagaagcagactactagattcccaggatcatgtccaccgcaaagtcaaatatctggagcgatgacaacgatgataggccagaagctcgcagctggcgcacgggtttcgacccttaggcccgccagagcgcacacgttgaaccagccaccagaaactgtatcgcgttccatcgcaccaatctattaatctaattctggcatctgggcctccactttgggaccatcggactgggtttcaagggcagcccatttggttagaccaatcgtctgtacggggcatagtgtctcatccttgcattatccacagagaatcaaggctgatttattcactagtgaatgatgggagctagatcgagaggggcgaggattgtaaggatgtgacaggggctataatcgctaggtacgatataacatacggagtacatacatccgtaagtagaagtaggtttcggcaagcttctattgtgtattgtgtcccttgtcctcccttaactttaacaatgcatgcaagttctgacaattgcccttgacatccatcaacaaaggagaagcaatacgagaaaagcaacgtcctgccactagaccaatctggactcgagtgacagaacgaagcaatcgtgcagtgcaggcttccctgcagcaaatcatcgttgtacacacttgttgggctgccacagtgggtctttcccaatgactctgtaaataattatttctcaatttctcattctaatccgaacaattatatgagaggcttggtggggattgaaatgcaggacatttgaaatagacaggggggtacttctgtcctcgattcggaagtatacgaacaatagctgcccctaccgatactatatcgaatattggattgtatgtactccgtctatactccgtagcaccgatcaccatcgcaaagtgtaagatgactcttaaattttaaattaaatctcggcgcaactagaaaaatttcaaacgcccacataacttccccctcggcgattcgtcgatcacttcttgtgtgtgagaccatctgcgttagcgtgcccctagtacgtatgattatttccatttccccactcggttgacaagctgtgttttttttttccttgttctacggttctcgtttcccttttttgtttcattttattccgtaggactccatacaagctcagccctggtgtttgttggagacccataactataatcaggaaatagaagataggactagatatgtggattttccttgatttccaatcctatttgttaaatattctgtgatatttatgttatatcgtaggatgttctaattacggagtccagaaaagatacataagaaattaaatagattgccagacaataatatgtggaggaccccgaatggagatgtagacgtgaggatatcccatatccaactccgtaattcttcccgcttctatggctaccatggaacttctcaggaacaagttctccccctgtgttacataatgatcgccaggatgagaacagggtagatctgttgcttctgattggactgttcattccggaattaaggacggagtaggaaaaattcaatcgtggaggctctgattcgaggctttgactatcgagtttagcttttagggtctacgatacataactcgcatactataataaggtaggttacgcctattttctccggggaaagctaagaaaaacagaaaacataaaacctgaatttctaaattgaccggattcccaatttccaattcccatttcccaattccctagattattagaccaatgacgctcagcagtaatttttagactggtcatgtttacgctccccctgaaggagatgtcaagtgacttccaattttggtcgatgtcgatcattggtccggtcgatgatagtctccattctgatccaagggctttggtgattgtgatttgattacatgctagcgttgtgccaattccatggatgggatttggtgggaaatgaatctttgctttgtttgatactatacagtatggtatacatactctatccctatcctatttactatattcactatactcctattcaacactatgatctatccgatcaatcacaatcctcccctgagtcgatcccttacgccgttacgggcattttcaagataacgggggtgcagaagggtcgagtggagtcgcttcttactttctattattatattatttgacatatattatattattgttttgttttgttttattcccatttttcccatgtccactttatcggtatagttagctcaaggtctgaatgtcaatcctttccaaaccgtcgacccatagatcggagatgggtcttccctttcgatccttgtctcatcctgttttcttttctttttcgacttctcttcctttgaacttcttcatactctcttcagcttttggtgcaggagggttccagactgtatcacctctcgcacctccccatccataaccatgaccactgcaccgccggtgcatcactctggccccgatagtggcatccccggccatctcgtcaaccatctccctcgctaccatcccattgccatgaatccaaatccacctccacaccagatgccgccgccggagcagatggtgcagagccaccatttccgccatttcgcgccgcccatgcatgaacatcatccgcaaggaatcccaccaatacacagtccagcttccttggaacatatcgaagctcgactccggcatctagagcacgaggagatggtccggaatgcaacccggagtcgcgtcttggcaatgcgaaagcatgaagatgaggaatttcggtcaatgacggagcgagccgaggcagaggaagaggtaagcgattgggatatccatctggtgaattgagattctaaagcttcacaggaccttcgaagacaacggaaaaagttaaagagagagtccatgggactgggcctcaatgccgcgggcgactcgccgcctcttcggcctacaccacctcgccgattatcagagacgagtgcagcaaccacattggcatttttcaagcagcaaacaccccccgagccccgtcaagaaccccttccatcttcatctcaggcgccgcctccctcaatgccgccaccccatttgcatgctcaacctcatcatcaagctcccccgcctcccccaccatctcagcatcaacacccaatgcttccccacgactcaatacaaatacacagcgctggctccatccgccgcaagcaaaaatacactatcaaaaacgtagaggcatggggcgaacgccacggccgaccagccgcccatgacccatccgggcgagcgttgtggaagagaccgtccgacggaagcttagtatatctcacctgcccgatccacagctgcgggaaatcagacttcgtcaccctacatggcttcatgtgccatctcaccaagaaacacaaagaccgcactctgggcagccaatcccgcgccctcgaagtctgcggtgtagtctacgacccgaacgctcccctcccgccagtcatgaacaaccaccgggcctcaacagaaggcagtcccctgggctccaatcccctggaccccgacggcgaccagcactacgaggacatggactcggagtccgaaggcgagctcgagcgcgagggctcctaccgagtcaagaccgaagtcctagatcggttcatgcccgacgcagagggcacccccattgaacccgctgcggcaacaccccccaagcacgcagccaacggatcaaccaagcagtccatctcgtccatcatcgaccgcacccccgaaacagaatccagagaggcgctggcgactcttccgccgtcggaatctggtatccagggtccgtcccctacatccaccgagtcgtctgtgccctcgaagcgcaagtacgaattctcgccgccggcggaaaaagaaaatgcggagccttagatggtgtgcggaataatgtttatcttcaatgtcgatttccgccggcaatacatacatacacctacataatttcttgagcgtctacgaatatcagcgctgtcgatatgataatctattgcatcatgctcttgtatttcttgtgtcggttagatgtgcttcgggcatgtcttttctcgataccctttcgttatatatgggttggttttggcgtcttctattttatttgaacatactggctcgaagctgtgcgcattaccatataatgcttcatagctagctgcatactgcatactgagcatttcggagtttatccatgcgtcttttgtctcgctgtgaatcacagccgctgggggtacaaaatcaggagattatgagagccttggctaccggaaagtgctgttcgggtcttctgctgctgtaaataaaactgtctcgagatatcggtaactccttgctatgtatatagtacacactcataagcacaaacaaatcaagcacctgttgataacatcgcaagcttcattggtggtctgaagtatgtttagtagttcgtggatctcatctatagaggtctgaaatccagactcatattcatgttagtccgagtactcttcaaagtccctcaagttgatcccgaatgttgctctaaacaatatagctagtgatgaccatctgtaggttgtttctgattttagtatgggaaagcctcagcctaggacagctagctatatacagtactcccaagataggtatgaacaaagccacctatatgtacttctaatatatctacatctatatgctatctatccctcaccaataacaaatgcaccaaatatccagacccactcctcaatccctccccaagcacatcatccctcaacctccaaacccgaaactcccgcatcgcctccctaagccaagtctcaaacacatcgggcgaccgctgctgctgcgcaataatacaaaccgtcggtctgcggcgctcccgcagttccccagactcagccacatacgccggccggagtcgacatagctccgcgcaggtgcgcacgaacggcgccacgagtgcttcgttgtagatgcagtcacaggaaagcaggaggtcgaagcctttatcttcgtctccttctccttcttcctcgccgtgagtctcgtcgagatccatacattctttcagagaggcggcctggtcagtctcccagtccagggttgtgaaggagatattagtgacaggcttggcggtcgttggttttgattttgatttggatgccttgctcttgctttttgctttgctgttgttgttgctagagacagggacggatgcattagcgtcgagattcgtgcggaacaacttgcgcacgtattcttggtctgtggcgatgtagtggcgtacggagggggctaggacgagcgcgactagtgcggagatgccggtgccgagttcggctactgttgaggtctggctgaggagggcggttgtccagagcgggtttgaggggttggttatccattctgcgaataaaggggtgattttccataggactgggtttgtagggttagtattggtttaatttcgggatggatgatagtaaatcgtcaaagcgggtggtggttgtggatcagtcgggaagtcgccaaggtatcccgaggtctgagcaagggaaaaaaagggtcaaggccaaggctaaggcatagcagggcaggtgacaattacactatgaacctcgtgtttggggtagaaaagcacagtgtgacagtcaccctccccgagagccgaggcacagacaatcatcggattggacaattcgacgcctcgaccctcggcctggtctgggcatcggactcgggtaaatgacctgcggagtacggagtagtccgtgcttgggtttgctggctctggggattccggggacaaatcatagaagaactggtgtagatcatgcgagctccagtcttggtgaaccggagtccgtacttagtacttaccggcgcctgtagttcctcccgcacgatgggaggagagtaatgctggtgattgatgaattatgtattcatggtcgttgatggagatttctactgatggtgcacggggattgagcatccccaggttgttgcttgggatgtcctgcgcgaagaggagaaatgactctatagtgagtttggtgagtgactgggtaggtttggggtatcgtattcggtggcgtaccctcatccacgtcaatgacctcttcattggcgagtaggttgatgagttggtccatgagttggtatctatggatgttatatggatgttctaatgtttttatggaacttttatgggttgggtagcacgttaagggatcacgggaccaaggcatataaattggatattggatatgaaatatacccagaatacaatatttatgccaatcccagtgcttctacacttcgtataagagctatgacttgtgaagaattgttgggaaacccaacagaaagggataacgggacctgactgaatagtaacttagcgcttatttatgcaatttcgacttatccataacaaaggcttaatttcaagaaggaatcaactgaaacatattaaataaaaacaagactccgtgcgtggtgaaaatcccaaagtcccaaagtcgaatatcaacccgaaaaccttggacctcctgcgtcatttgccgaccagccacatatccaacctgccagggcccaactttctcctcttccccggtgaatgctcagttcatatctcattttaataccccatcttctttcttgacttggtaagattctattccaactcttgttctaccccgtggcttgttacagctcgtgtgctttgccccttcctagctccgtgctattcccgcactagctaaccgccgtccccatcgcgtagaagatctttttctttaaatatcctcgatacccggccccttccgctttccctttgagcgagacacacagtcaacatggcgacgcaaaacattcacctccagccgcgcatggtcaagaagggccctttctcaatcgaggcgcccggatatgagcccgtccccggtgagacaatcccacgtcgacaccccaaggccaagaacggcctcattacgacccttgaggatgtctctaccacttatgagaatatgcgccggtctgctcgcgtctttggcaacgccaaagctgtcggcagtcgccggctcatcaagacccacgtggagaacaagaaggttaagaagatcgtggatggtgttgagcaggaggtcgacaagaagtggacttattttgaaatgagtggttatacctacaagagcttcctcgaatatgagaagctgtgtctggagcttggttgcggtctccgtaagctgggcttcgagaaggagggcagaatccacctctacggtgcgacaaggtaagacattgcgcctccaaagagattcggagccagatgactgacttgattattcttatagcgcacactggctggccatgtcgcacggttcgttatccctatttccatgacgcgaacaaacccactaacctactacaggtgctgcatctcagtccgtgacaattgtaaccgcgtatgataccctaggcgaggaaggcctaaagcactctatcgttcaaaccggtagcactgccatcttcctcgaccccggcctgctgaagtcgcttatcgacatcctccggagcgtgcctacaatcaagcacattatctacaacaccgacacggaaatcgaccagaagattcttgatcagttacacagcgagtttattcacatcaatgtgctgagcatcgaggacttgcgtaagcagggcgaggagaaccccgtggagcctgttccccctaagccggaggacctgtgctgcataatgtacacctcgggcacaacaggcgcaccgaagggcgtgccattgacacacgccaacgtgatcgctgccagtaagctggaaagaatcctccgaactgtctattaagctaatatctcgcaatagctgctggtgtccacaccgtcatcggtccctgtatcaaccacacggactccctcctgacctatcttccccaatcgcacattctggaattcatgttcgagaacctgtgcttgttctggggtggtaccatgggatacggtaacccccgaacgttgtccgatgcctctatgtggaagtgcctgggtgatatcaaggaattcaagcctaccgttctggtcggtgtaccggccgtgtgggagtcagtgaaaaagggtgtcttggccaatctaaacaaggccagtttcgtggtcaggggtatgttctggggtgccatggcagccaagagtttcctcatgtccaccggcatccctggctcaaacatgggcgcctcaattttggacgccgttgtcttcaaaaagctaaaggaggcaaccggaggccgactccgtgtcatcatgaacggtggtggccccgtctccaaggaaacccaggtgttcttgtccatggccatcgcccccatggttagcggttacggtctaaccgaaacctctgccatgggtgccctgaacgaccccttggcctggaaccccaatgctctgggtgaaattcccgcctcgatcgaggtcaagcttgttgacttccccgatgctggatacctggcctcgaaccacccccctcagggcgagattttcatccgcggtggcagtgtgaccaagggctacttccacaacgaggaggagaccaaggctgcgatcaataaggatggctggttcatgaccggtgacattggcgagttcgaccccaacggccacctgaagatcattgaccgcaagaagaacttggtcaagaccctgaacggtgaatacatcgctctggagaagctagagtctgtctaccgctcgtctcccgtggttggcaacatctgtgtctacgccgccgaggaccaagacaagcccattgctatcattgtccccgtcgaggcggcactgaagaagattgcccacgagaacggtatcgatggtgacaccatcgagaccctcgttcacaacgaaaagctcaagacgatcgtcttgcacgagctgcagtccgccggccgcgcgggtggcttgaagggcattgagattattaacggtatcgtgctatccgacgacgagtggacgccgcaaaacgtaagtgattctcaagttatctggggctcgaactctgctaacgagacattagggtttcatgactgctgcgcaaaagctccagcgcaagaagatcgtcgcccgctacgactccgagatcaacagggcctacggcaagaaataaaagcgtgtcaaggtgcttcattcactggatttcgcttcgcccttgtgttttttattcctattttatttccctgctgtattgcttgcgctttgagaccctctctgttattttcactgttcaatttatgattatctttcgtgactcttgctcttattgatattctgccacgatgaagatgatatagtaatcaatgtgggcatgaaatgatcggcatcacgaggacttagtctatcgtaaattcgtaatcgacatatgggcctcgtattctatagaaatactttttgattggctattctcgcacccaaagaggtttttagtctaagaatgtcttcaatgatttcatttacccggccagctatcatacatccagcaagtctatcatatacacagaagtacaagcatgtacgtagcagtgctttgtccgaagtatcccggtacctcatttatcagccacagttacaccaccccccagcaattcacaagtatccggggttgtccatgtacctggcaggacttagcggcagacaaaaagacacacgttcgaacccgtcgcactggtacagattgaagtatagtcatagagttcgctagcctcagttaccaagcaatcccgtgaccgaaagtgtagatatctccacgtgactctctgtccgttgagtagcaagttgaaagtcaagtcacacattgcccccattattgcctccctccaagactagaataatctcattcccagtccaaatgtctctctggaggtacgtgacacagctctaaaccgaccaaccccggcacacaccaacacccggactaccgaggcaagaaagaaagtcaagaaactaacaagcctcacagctcctaccgcggcctcgcccccaaaacccgggccctgttcggtatcggtctcatggcctgggcaggcatcggactctggaccacgccccaggtagaaaacgcattgggcatgcagcctacgaaagaagagcaggatgcgctggatcggaagttggcggtgcgcgtggtgcgtatcggaggggaggaaggggagatatcgaataatcgagcaaactgagcaattgatgaattcgacgaagacaaggcgcgggaatggactctgggagctcatgtgatcagcccatgggctggtgatggcgatgggctatggggtgtgctttgtggtcggctgtgattatctacgggagtcatgggtgcagtctcacggaaccacggacttgaacgcgactggccaggaaagggagaggagggaagtgaagccagtccgttgcagactgccgggctggtacggaaggaagtctttccctggggtatttttgttgagtcaaccttcctccagaaactcaattgcaattgcaattgctgcattgcttcaattcgctgcgcccgtgtccgtgccagacgtctaaactgcctatctacataccgcatctctatccatccccccaacgcatcgggactccgggattcaaaagaagacccggtccggatggtcacttactatgtacctacactagaaagcggtcatagcgaccagtctgccactgtttgtctcgtcttcgcgtcccgccaagacaaaaaagaaaaacaagcaaacaagcagtgctcagtggctagtggctgacgccccccgttctcgatgtccgacagacctgctatgcgcgtgcacgtcctcatcggaaagaccacagggaaatcattccggccgtaccctgtctttgcccatgctcatgcccacgcctgtccgtgcggctgcaacgaccccggcttccactgctctgttcgcagcacagagaagtattgggttgctgcagtcagcggccgtctttccctgcctagcctcacctcgcggacgttttattatttcctttctggggcattggttgggcattcctgtggctcggaagatttactgcggctgagagggtggatcgttgcttagcctggcccggatcgtgacatgttggttcttgtggcgaggggccaattagaggtcgattttaatttccgacctttctcttttgtccgattgggaaagtgatgcgaggggcagtttgtctggttgggattgggctttactacgattgtttgtttgagattttgggatctccttttctagacttcggtcatggtcagttcgtgggttatttggaatatgcgtgtctaggttagcttctactctagttatcgaatacttgtcgcattgcctagatgggacgtcttagggtcatattgttccaaggtaatgtgaaactattatcaaaacacgttatatcgataagtctaaagcaacaaacctcgtcggtatacaatcgtagtgcggctccgaagtattgtttcggaagttagttctatgattttattcatattgtagcacgagggacctctttacccttagaagaatcttgtgcatcccaaagatcgatgctcatcaatcggggtaatcggagattcgatccatagggactcttcgtcatgccagtctcgatagattgttttcatctttattctattcatagatgccatgatctcatccaaactcgtagttagctccccgagaaagctattttcaaaacattacctcggatctacagagcggtcatgtgttatttcgggtaggacacgactagcaccatgctctggaggccgttgaggtggaacacgaccatgctccttcgatggctgatagcaggtaaacactttagctgatccatagctccatctggaagaaataaccaggtacgttcgaacatacgtagaagctagcttcctagctcgcaatgcgtccaagacaagcggcgagagtttgtattagagcagctgtggcatggacagggttttttcctagtgcagtagcaaaatcgatcgcggagatgttcatgcagagatatcactgtccatatccgtctcttaggcaatagagatagatatcttaccaggctaattaggttaaatatcaagtcttcagacggattgtcttatgggcgtcttggctcgatcacggatagggttgattatcgtcgtactgacaacccggtgtcctttacttcaggcttgtgccttgccgctatagaacgtagtctccttgcttttactcttgagctttaaatgcagttcccgggatttgttgacgctttttattggtgctttctgtatggatattccatgctagtaaactatggtcgatctcgcgtggagatgtgaactctatgccagtcctgcgatgtctgatcttcagaggattgtagattatctgcgtaggagcaggagtgggaagcatagcaatgtaacctacttgactgtgacgatagagtagatcaataagattaaaagatgtagataagggcacatatacggaaataccatgaagtatgaaatagtggcaacacaccaggatatcaaaatgcccagcccgaccaaagaccatattaggagtgtcaactcaaggtgtcgaataagaaccccaagcgcctaggattgcccttttgtctgactccccttgtacgacgtgcagaagtacctatccaaccggtcatgagtaaacaaccaatgatattagacctaccccaagtatccgagcatttttctcaggaagaatacaaaacatttattcatttcccttcggaatgggaaatatacacccctccagtggcaaaaccacggtatataccaacgagacttggcacaaaagctggacttgaacccaattgtttcagataaagtcaaaaatagtctaattctaacaagaaaccctcatgatccacatacttactatatctctcaaatctcttaccgcatgcggatgtaaggtttctcccccggcccttcacaggggatgttattgacaaggatccgagtgtttaaaacatcggaatatgccgaggtgcagcgcggcttggctgatacgagggtatttctcctttggataatttaacatgagacatgaacaggtttcattggagagattggatcttttactttagcataccgtcgaactgatggtcacaccaacgcctgttttgtttcacctgatatacttagatagagataatcgcatgttgaatttatagctaatagccagacagggctaagctgacatgtacgtacattgtcatgaagcatgacctgcactgctgccgatcaggatctgcatctaatgatttcttacatttaataatacgattaaagtgaaatcctttatactaccttgctataaatctctgctgcctaagaaagcaaaccctagccctctcagaactcaacaaacagactgctccttaactctccaattggctcgaaacaccatgatccattctgcatgtaaccgtttctctcggaatatctgcacgtacaccgtccacgacggaaatagtgcccaccttgcttcgtttggttttcaagaccggagcctccccaaaaagcaaaagcaaagaaagtgggaattaagtaaaaaagaactagtaatagcgccacaataagccctttaatcttgcatggccttttaatgaactcaacccaatcattcgctcattcccgcaggcgaaatccatgtttgcttacttcggcgggcgtcagtctatgtagtcatcagacacgaaaaaaagagtcctggaagcaaattaccgtaggtccttgcttcaggtttgattgggtagttgagtttgggagaggtaaaaaataaaacaagtcaaacaaaacagcagaaaaaaatgcggaaaaaaggcaaaagcatcaaggcagagaccgcataagtccatatccattgaaaaccggactggcagccctgtaatagatgaagaccaggaccaggaccgcagcaaataacggttcctggctatgaagagagcaaatcggggagtttaggggtacgcctttaatgtttgttttcgaagatttgtgtttgtactataacctagctttgttgtgatattgtctttgtaccaatacttagacaatgctaattcaactctcattatcggattactataatatcaagtccagatcttaatcaaatcggttctattcgctagcatattccgacatttgcttttgaagacagtcttaatggcattctgtatgctttttctccgaggcagacacatgaaatgagacagtatctcgagtagaattggagcgaatcaaaagagataaagaatagatcacaatgaaataaacaaaggccactaatcccactagcaaccagatgataggaagaataaaataaaacaacgaatagaaatggcctcatgatcccccacgccgtcctgcaccagtgcataaccccttttccatttggtcgtatcgagcatgataaaaagagaaaacacgagaagaaatcgagataattcagaaaccaggggcaaaacaaaggcacagcctaagtacatagactatgcgaattctggatcggatcgtaacggctataattcgttgagtagacggggtcatatccaccagtattagactggcgatgttggtggggaacccctgtgtaggtattatcctgatatggatctgatttgaggtaaaggtcagacttgattgtgtccatggggtccatagtgtcaatcattgagtactcgaacccagaggaagacgaagaggagatgagaggactgtcgctgagtggagaatggtctgtaacgttaattttccgatgatcggatctgccgtaagaaagaccatttcgatgcgacgtgtcgtacacgagcatgtgggaacgacccgtttggcccagcccatgaggaatgacaccacaggtgttgtctccgccagccccatccggacccatgctaccagtactgccacggcgtccgtccttgtagtgaccgggtgaacgtccgcggacgaccagggggtgggagtggcgccgggcgatttgtacccactcagtttcacctgggaccgagctagcaacctcagcgtacagttcaacgaccagattgtaatattgttgctgggcacggcgcttgccattgttggcggtcgctttctggaattggatacgttcgaatacgtgggacgttggaggctgacatggctgaggtgtccccgtgaaagaagggttgtagtccatagattgcgagccaagggggaatcccgagagacttccattaactgttgaggttgatgtgaatgaaggcggaggtgcaggctgaagaatgacacgacctggtttgcgttcggattgcttgtctcgctttggggtgtgttgaacaagttctcgagtttctccatattgaccgttcacgatagcagaaatggccattgaaaatccacggattggttcaagggtctggtcagggtagcggatgtatagaggagcattgggaggccaaggatgaaggccaaagccgcaggtcaccgcgaagtagttgcggcgatagcaagtccacttgccctcagccggaaagggccctcgacccatttttgcttggacatctggtttcaccgtctgatattggccaccaaactctgcaacaactgtatgaaggatagtcgtgtcgtcgaaaggcggagcctcaatctggggctgtgagcgttgtggggactcgactatcggttgctgatacatattattctgagatcgatccatcccgctgtctaaggcgcgtggagtgcccggatacccatgacgggaaagatcgttcattccccccataggcaagccgatatttccaattccgcgctgtaaagcgtatgaaccgtaggaattattgcgccccatgagtgccggaatggagttcaaggcatgccctgagctctgcatccccgtaggcattccagttggcggttgactagaggaaagatcagtactgatgaacctcatccacctttacaggagcgtaaagcttacagcgctggcacccgttgatagtctgccattctatcaaagggatgctgaagtcgagagatatgtgggaagaggggaccagacgtgggcgaaaatgagtcttcacatcgcaatgtatcagtcaaaggaagtctctcgggattgaaagtaagaaagggcttaccaggacaagagtctggcggagtcattgcaagagcacccgaactagaatatctaaagtgaagaatggctcagtaacagctcatcatggggaatccacgtgcgatcgcctgtaattaaaacagtccagaagatatcatatgagtccgggagcggcacggaaaccatgatgcgtaaaaagacaatggaaacggggggcgggggcgaaagaggcaaggacctcaagacacggcacgagctcagatgaaaaggacaaaacatcggaagaaagacatgcaggcagcagattggtatggaaggtaccgaaacaggctggactgaagttcaagctgcccggacccggaggaagcgcagcgacaagggggtcgagaggctgaccgagtggagcgcaagggcaagtccggattgaaagaatggaaaataacttactgtaaatcctgcatcaaaggatgctgtgcgtggtacctcacgccgttggtgtcaggcatggagacgagacctccgactcgctggctgttgtcgtcttcgtccgttccaaaccctgtcacatgagagttcatatagtcaccctccgaagtaacgggatcgttcaatgagaatacctccgagagaagtgctgagaaattcataggttagagatgaggaagatatatggggaagagaaaaaaaaagaaaagaaaaagacaaaggcaagagaaaacaatgtcgatgtcgaatcaaccgcatgacggaataaacagggaatgaaaaagggagaagcttacagggattcatcctgagcgtgctgataccaggtgcctcgaggaccctgaagtttttggtcaatgtaacaccgggcgagacgccaaagctgtctggcccttgaggtcttgggtggcaagaacttgatgtctagaatagcaaaggttaggtaaacacacaatcaaattctctcacagtacttgattgttacctttgacgtctggatcactcagaaggtgggtgctttgagcctatagaggtgggaaaaaatcaatacagctcctcttggtcttggagataaaccaaaacacaattctcacaagaagttgtttggaaggcaagtagcaaacacggagtaaagggagggtgggggagaaagaacgaagaagtataaatgaagataggaaaggcctttgggttataaagtgagcgtgaagagtaatacaatatagtatgctcagtagaacggtgcgtaaaacggtgcccttttcgatgttgacaggaagtagatgatcgtccgggagccaaaagtgcgtcaccggtttatagacatgacttcctaattgggcgatctcgcattaacttaagtcataggtacaaaagtacaagagaagagtgttggaatcgatcgggccagaacttatagtgttctttgcaaagatcttaaaggagaggggggtatggagaaagagaactgtagagaagaattagcccaaagcgagcaaaaagccaagaatcccagaaagcacaataatagcaaaatagcaaaatagcaatcgcaggccaacggaggggcaacaaaaaagaaaacagaaaaaaaaacaaaaaaacaaattgaaaaaaaaaataatcacagaaggggaaaggaaaagacactgatgtaatctggtgtgacagcctggggacgacgagcaaataaaaagctcttgtcccggcacaaataggtaagtatcttggtattgcagcagggtacttccacttatgcaaccctaacttggtatttaagaacggccgagcagatctggaggaatcatctcttttgacaggttgcaggaagtagatatgcgcttacctagttgtatagatgtataggtatagatagttgtatagttgagtagttcgatatgagggctgagaccagatgtatgtgattgactttatccccggaattaacaaaaggttgcaattggtatgttctacccaatgaagcttccggtctatgatattgtctagagccgttctcgggattgttggaggatcattagtctatcctggtaaggctcagggcccactagtgatggtctagccgagaggcgactataaccacgagttggatctgccagggacagtgaaatacgctgtattcggtaaggctccaatgggggtggtggatttgcataggggtccaaccataatcgaaagatatccgggttatcattttctgtgtatgatctctgtgggaaaaaaaagaaatgaacaattttctttttcctcaatcatttgtattttgaagtcaggatttggaattttgacggggtcgagcgcaatgaggagagtagcatcaaatcatcatcggctccagacagtttgattgttgaaggcgtatggcattggtcagaacaccccatgtccacgggttgcgtgctagaaggacccgacggcggctgcacggaccgtaggtaaggccggtacgtacacgttgtatgtgtttttcattacagataattcccgatgggatcagatgtcctagtgcgaatacccgacagacgggtcgctgcaggagagcgaaataagatgaaactagaaaggatagaggagatgatcgacctccgggatatgtaactatgcagacccatgacagggacggttgatgtatcagacttggaggaccccagaccaatgataaaaaaaaggcgaattaaatatgagaaatgaccaaatcgggtagaagtcctgaccgaagtccgtaatgtttccaaggtctgtcggagtagttcccgtcatatttaattcttttaagccgtaagaggctcgaggcacgagctgcggttcttgcatgaaggaactggacgatcatgcgatcgacaagttccattaagcatgttgcattgtccatgttggcggtgttcacaccgacagaaccggacctgggagagcaataaaaatagcacgttcgagacgatgcaccccaagatggagtatatctactccactccgaaagagagattgttctggtagcggtttctcttgcggcgcgaaaccgtgccctaactgcagacggggggtctccagtctccactagagaggctaaagcagctcggtggggtatacaatgattgcggtccgtacccgggagccttttccagaaatcgagcggcactagtcccaccgttccgtcaatgaaacgtccagggaactggaatagattggaaagatcctggtctccatgagtggacagtcctgatcgtgtcgacagaactgcattagtggctagaagatcgaccatcctgcaggaggctgggtgagatggcaaggtgcagtgaagaagcacccgcaagcttgtgattgggtagggtagataagccgtatattcgatttcctcagtggttatggcgggtatgttgtgcagctattcgcccccacgggcacataagaccgtgtgggtaccgaatcggtagggagtactccgaactaggtgcaggattgattacccgtaccaaggtaataaagtactgatcaactataccaactttcagaattccaagggagacaatagtgaacaataacatatttctttttgactctggggggtcagccccttcccggatgacggggctgacacgtgcaggggcggtgaactggacgagatttatgtagtaggtacgtgggttttcatattagattagtggataaactatgtaccatgtacttgtgttctgcctcctattagggcagtgcagtaattgttgatgcttaaattgatatagccagcatacatttcattcgaaggttaggtgctaaaattagggcccaggggctatattcctagttcgacattaggcgccaattgaaatcaaataatttgtgcaactaacccccccggaagacactatcagatccatcggtccacccgtgaactctccacatgtcacttttcgacatatcaactcactctacttgtgctcaggtacggagtacagaactatagatacaggaaacgaatgcccgcaaattgtccgatacggtacgtccagggctcactgcaggtacctcgaagccaatgccaataatttgactttagaaatgcatgaacccatctatggatgctctcgacatggattagccccagaaccctagaagccggaaaactctgacagcttgacgttgcaactgtctcagtccatctgtctctgtttcgggcacgtgccatctaccgagtctgtcctcccaatggttgaaatctcagaaaagaaaaatatatatattcccgtgcaacaattcttggctgcacgtcaatggcaaatccaatgccatgcccttcattgctggttacattcgggtgttcgagcttcggacagggggcgcaaagctacagctcctgccaacggtagagaagctataaccacatcccggagtcgggattgctgactcaaccgtgttattcgccctggagatcagaaaattcaaatccaaaaaagaccattggccaatctcaccagcgtacagatccagagtgtcatcccagacggttatctccccgggtcttgctgcctcagccccatatgcttgttgctccaggatctgaggatgcgacacgccccatggacccataggccatgtccaatgcgccaatcctggtcgatggggtctagagttcgaagtcttgcatgtcggggggagatattcctggacgatgactaccaagtaaggaaagagtcggcaaatcctcctatccggagacaatcctgtgaggcttttctttctgccttggtgattgagacagattaaagttttactttaccaacggccgcggcctctagggcttccatccccgagacatccaccggccttgtccgggcgtaaaaattgatctacctaattctaccagtatcttgtaccatgtcaagactcataccatgtcgagctagcacattcaaggaaaatggtatgatttccaaactaatttcccttactcgcatccatggagattaaacagttcaggcctctatggctccacaattcagcattgggtcgcctgggcacaaggttctgtgatgggttacctgtgtatcacttcttccgagattgatggttactttcagtgaaagtagacccgagtactggtagcctactgcaatgggctagaatgccttgctgtgggaaattgcaagatcagtccaccctgcttcgccttccctgtccgcgaagacaagagtttgccccgagaccaggatgatcattggcagtttccccaccctatgatcccaaactttgatcaccctggatctacagcccgccagcacagatcgtatcacgaccacgaagctccggccagaaaagttccatcaacgtctgagagtatccgaccctgtcggcgtggatggaacgacaaggcatcaaccagacaaggatgacaatggacagaagggtgtttgattggttcgccgccctccaattctggaaacgaagcttgtcaggcgaggaatatgctttggatggcgtgggatgcaggccagttcaagactccactcatcagccagcagcccatccggccgtttttttgcctccccgtggcaattctcagcccttgacaatcatcctgcgagtagctcagccaaccccaagccgtgccggtgtagcacggaggaacagccaagacaaaacttgctcaccggccgaaacgctcccagtgaagaactgcccttctggtcaaactcctcaagctaatataagtgcatcatgttgtttggcgccgacattccctgcaaggtcactaagacttcggaacgtcacgaacgccctttcacatgttgatgcagccgtggaaaagtggcagcgccagaacacggtgggctggtgagcgttttcgagagagccaaggccaaacctgcagggagcaacatctcggcctctccactgtctccgtagccccgtcttgtttagtatgggggaggccttcggcgaaaagccggacccgtaggtaagcttttcccacatattcaagtctctttcctaaaagaaacaccgatgctacgttatgcgacccatcccgttaccgggaaatttaacacgacaactgttgccgccgaggctgggtctgtgtctgacttgctgagatctaatatcgactgtactttggtactttggtgattgaccctgggatctggcacccgagcgcgtagctagtacgtagttggcctgaagctagggcacaacaggaaaaaagtccaggttgcccgagctccatttccttccgatgtcatctccactgtcatgcgaagatgcagaaaatttgatgtcgaaatgcgatccctggagccctttgaaaaatcgaacagtcgagacctgcgacgtttatcttccagatgacagattcgccgtcaacggcgtgcaggattgttgtcagccgagtccggtacctgggcactaggtgtggtggctaggagatggagatttgtcaagcctgaagccagcggcgagagagcttgcaaagagcagaatggccttggttggcatctactgttatcatgttaaccagtttgagcttttccgggagaatttgcacattaacatgtctagtggacgttcaaactgcgtttcgacccaacactgatgttcatccccacgcttatccgcacgccgaaaaagacctgaaatgctgggcaatgaggtatgttcgcagaattgcctatatattgttttgagacatcgtccgttcatacaagcacgggttgatttccatggacgcttgagatgttccatggtagcgtgaagcaaatatagaacaagtgcttcgagaaggacattattggaagtaaagaaacactaccagggatgagggtacgaccgtaaaataaccaagaaacccatgtatgaagttcaaaatttctctaacccattgcttttgtatcgaccgacgaatataagtaactgacatgcttgatgtctttttgggaatcatcattatcaaccaggtcctacagtacaaggaaaagagcttcggcccaaagataggcccgcctgagaagaaggaaacgttccattcaaaaagtcgtaagagagaaccgagaaagaagtttaagtagtgcgcttggcgaactcgacgcggagaataaggtggcggtaaccgactagcagaagaacgggttagcactcgaggaacttgtaaaaagaagatcacgaatcggagcgttgaagacatacagccatccaccttctcgcaagcaagtgctgcgtcgccacgatccgcatagctgatgaaagcaaagcccttggctctctgggtttcccgatcccgtgcaaggaaaactctggtgacacgaccgaaacgctcgaagagatcccgcaactcgttctcctctgccaactcgctgacctatttgaaaaagtcagtaccgaaccaagataaacaatcacgatgctcgtagagctcatagagctcgtagatagcagaataatggcagaacatacgtttgtaactctcagtgtcgccaaatcgtccttctcgaagcgaccacccatcttctcgccgccaccagcaccgcccttccgcatgtgaggaggaacgtagctggactttccagcaccaagaccacccgcatcgtcctccgcctcggcgccaccagcagcagaagtgccctcctcgacgggggccatggtgtccttgaagggacagcgagccgtgaaatgctctccactgcaaatacgacacttgaccttcttgtccttcaactggtccttcatgctgcccttctcgggaccctccttctcagcctccttagcattagccttccagttgacgctgggtcggaagacgatgttctcgccgacggaggtggtgtcgaatgagggaccggcggcgtggcccttctcgagaccgaacttgtcccatttgcggcgttcggcgacctgagggttgacgtgttcgcggacaatagtggtcttaattcggcgggtgaccttcactttcttgttgtcgtcattgtagcggtaggaaatgacggtcttggtgccgtccttgttcgcgatcacttcttgcggcgggagcacggaggggtcatcgaaatcttcgtcgtcggcccagtcggcgcggctgtaaaatagaaagatttgttaggccggtgttttttgtaggatgcaactgtgtatactcacttcccagctggagacatggtgtaagtgatggtgttattacggctgctgaatttctggatttctttcaaaggcgaatccgttgtggatttaataatttactgtggcacagctgtggctggtggcggaaatcacgtggcgtggttccaagttctgttgaacctcgttctactctccgataaacatgatggcattcagcgagtttcattcccttcaaacagagtgaatattcgcagtggtcagagaatttattcgccctcattccatacttcattttgtggcacttttcctatctagcaccgagcatagcctcaagcaaggctagaatacgctccctcgatatgcctagagccaaaaaatgacacggacttccattgcttcctctaaatgatccttctatgtacgttggcttgtcagttccagataatcttatagttaccatacagactagtcaccacatggacacacaaaaacccattgtggagtatatactcgcaaataatatcaaagtcccgtttcaaaatccttcaaacccttcaaatccttcatgtcgtcttttgaaacgggattcacgatttgtatctatgctctctatctcgattcttcagatctgacaggagctagatagccacctaccgctgcaagccccaagtttggtgttgatcggggcgaaattatgtgccatgcttgagaagcgtttttcataagttcatgtattcactcagatcatcacaaggaataatcttacttagaaaatacgacaagacaatgccactcgagtactgttatatcgacctcttactcttaggaagtctagcatgcatgaatacatcatcattttcttcccttgatcctcactggggggtgtaaggagggaatgaaatagtcgccaagagcactcgtgattctctcatatcgctgcttccaggtgggatcggtctttgctacagtggctgtccaggcaaagtagtcccataggatgcagatcttcttactaggcataagaagcctgaatacgccaacgacgtaatccgtaaaaagtgccatctcccagcgagagcggatcatcttgttgatcctccgttgttttttgctttttgcttgcgaactgcagtttttggcttggctggaaaacgcggtatgcactcgttccgccaaaccccccgtccacccacctccaccacccaatcctccccatcttcctcacaggaggtgtacgggcttccacatcatcccctgcatggatcttctcgccggtcccctctggctgctcgccaacaatgatatctttcaggctattttacgatatattagcctctgtgcatacataggcaaagatccgccaatgtagtttccatgagaatcgtgtttcaccacttacggggtatcctcaatgtcctcgctcttggaggctggtctcctccaaaaaaaaaaaaaaaacaaaaaatagccggtgccagcaaggcaccagctatgacaatcatgagggcccaaaagcctggcacggctaccaactgttggctcatggaccgagaggtcccggaggtagaatctctggagcatgacacagagatgaggcttcccatgctctttcttaatgaagatagagtaatcagaatttgtaggataaaccccatagaaatcagtacatcatgaagtcacagataccattctcggggactttgcatctgacagacggatatcagctggtggaagttcgaagtcgccgtcgtcatcgaagtcgatcctgtcgtggtactgtaggtcgggtcctgcagttgcgattgacagttatagattgataaagatatgaagaggaagagatgtgataatgaggtgtgaaggggataagtagagtcaagtcgcgaggggaatggaatgtgaatttaaccgggctgatatgatttcagaagtgacggtaatgtaagagttagctgagtgagaactgggggatttggcgtacaagtcatatagaaggtaacatttaggagtgatggtaatggaagggtaggtgaggaaggctgcgtgcttatatatatatcgtattagggagagcgagaagcaaaggcgagtatgtaaaggtgtaatggaagattcctctttttgtacattaagaacgcaaaccaaagcgtttaaatggccatatcatcatttgcttctcacgtgtacaaaatagcataaaagatatctagaaacaaatcacagatcaaaaatccttcaaagcctcctcagtccaatcccacaacctctccgcaagcgtatcatccctcgccgtctcatcaagcttcttatcctccaacttcccaacaggctcataataacccccattccgaatctgcgccttatccacagtagccgcccaagtctgattaaacgcaccctcatgcggcagcacaatcctccaccagcttatcgcataaacaagcaacttctccttaagcccaagaccactaacaagacccgtccccacaataccaggatgcaccgatacagacgtgatagccgggaacctcttcgcgagctcgcgcgcatacaccagattcgccagcttactctgcccataccgccgccacggcccgccgaaccccatatcctgggtcgtcttgagtttttcgaagatgatgccgccgtgcgggtgcatgccccatccctgcgaggtaaggagcacaatgcgtgggtctgcgcaagcctcgaggaggggtaggaactttttgatcagtagtgcgtggccgagatgattggtgccgatttggagctcgtagccatcgactgtttggcccgggggttgtgccatgattcccgcgttgcacattaggatgtctagggtttggtgttggctggtgaaatcctctgcggccgttttgaccgaggccagggaagataggtcacattttatgaatgtgactgcgagcttggggctggtttcgtggatttgtttgatcactttctctgcacttatggcgttgcggccgctgaggtagatgtgtgatgggttgtgcttggcgaggtggattgctgatgctgcacctagcccgccggttcctggggggctgttagttttggacttgtggaaagcagatggaatttggtttatacctcctgtgatgaaaattgacttccccgcgagatcagggatatctttttcgggattatagtcgagaggcatggtcgaggtgtgtagttagggctagatatgttgcgcacaatatcaaggtttgaaagtatgttggattgacttggaatagagaattttagtttgaaataagaagcagattaagattcttgccctgcttttatactgggaggtgcacgatttccgtacccaaagatcaaacatcaactttccggattgggaaatatgcttgaaggctccacatgtggcttgcccagccaatggaaaccaagagtttccgagctcgccaatacaatccgcctatctggcagtcttgatcatgattctttacgttcgctggaacggcttgatattgtaccgaagagcaagtggcgagttttctgaattcccccgagtccgacggtgaagtggcttagacgaatgtcagctatgtagcaatccttgtaatctccgttgcaaactccggttgaaaatcgttgaatgttgaaaatgatgcaatatgttgtaatgcaactatgcaaagataatgatatgcacaaaattataaccctattcccaatctaatatgtacatcgcaaaaacccaaaatcaaaacttatcgacctatcatacgaagctcaatcggtcgcaagatgcaatataccgcagcagcaaaggcaaagcctagctcaaatccgacgtcaccaccatatgttgggtcaccagcatgcgcggcgataggacccatccaccacgtttggctcatgcccacaacaacaccggcgacgccaaaggcaaacgcaatggctgcggcgattcccatgggcagcttcttgggatcgtcgtagtcctctgcagaatagccaccgaatccacgtcggaaaacaaagtggtcagcgagtacaatgccggagtaaatggccaaccagtaggcgataagggccatgaagttctcgagaacggtctcgaagtggctgtaaccggggatggcgatggcgagggaagcgcacgaagcgaggaaagtccagatgaatcgcgggacgcgctgcgtagcccggctcaagacctgcaaggtcaagccgaccgagtagatgttggggcagttgttggcgataatggacagggccaggacgacgaggcagaacttgccgaagccgccgagaggttcaagcacggctgcgagcaggccaccgttgactgaggctgcatagccctcggcgtacttgttgtgaactccgtcacccatagccgtcgcggacatgacggcgataccgaggaattgagtgaagagaagggggacgatcagaccaagccaagcagaaaggaagaccaggcgacggctctgggtctttggctggtagacagtgtagtcggcagcgtaactggtccagccagttgcgaagccatagacagtggatccaaaggacaagcaggcacccatttcagaaactccgactcccattgggatgttgacgaaatcgccggagtgggcgaatgtgcccaacacaatgaaaaacacgatgcaggtgggaatccagctccagtactcatacatgtgaacatacttgtacccagcaaaggtgacgaaaagtgtgcagaatgtgatgatgaggataccggcgaatccagggactttactgttcaccgcgttgaggagctgggcaccaacgatggcattggcagcagaccaacccacacaggcgatgatgttaaggacggcaactagacatgaattagcaaaattaacgcacacaagctgatggagagccaacttactgaatttcacaggccaccatccaaaccagaatcgcgagagcaccatctggcgcagtccaaacatgggaccaaagcacgagaagtagcacacggtcatgacaccgaggaggttgaaaaagagacagaccaagatggcatcaacgaagcccaaatcgaatgcagatttaccaagaacgccgatggcgaaggagctgacgaccatgtttgcggccaaccactaggtttggtcagtggaaaaggccttcaggccacggcgatcacgccaggtaattgcaggaacacaccatgctaccaatattaagataggacgtatcagtccgctcatgctccggaactcgctcgacacctcgctgctcgatgttgagcttgccggctaagcgctggatcttggcgtaaagtgaattgccatattcgaagctctcgccgggcacggcgccatcgctggagttgtcgaagagcttgttgctattttgttcggaggcattgttcacctggggcgccttttccaggtcctcatgtgaggggaacattttggaggccatgtttgcaggtcgaatcctcattaacgtaaggcgaagaattggagggagacgagagtatataatcgggagtaatcgaagagctgagtagtctcagcgagacccagggagttcaggatgaagggattgatatcgaatcagtgacacatcctctctttcttttttttgctccaccgaacgggaggcgctgttaatatagtattgtgtcgcgagaattctttgcgcgtccggccccaccacgatctctcgcactgtggcaaggatattcctgtcgcgtgttcctcgaaaagatccataaaactcagagacgggccgaatgacaagcccttgaggccccatcaatggattaggtggaccaatcaggacagccctgccaaccctagcttatcaggacgccgagaattctggccttcgcttccgtctcgggacagttggcgttgtcattggccgacggagttgtgtgaacggtggaagtggagtgtctcgggactcaaccctggagataaggacaacctccgactcccgatacctctgatagtgacattactcttcactccaccttgggccagtgaaccttctctgaccatccttttaccaatcacactggcttgatcttatcattatacaggggccgtctacttggctgaactttgtctacacacaacacccctgattggcagcatgccacgcctctctgcctttcaatcaagcttctgggtccttgccagacgggacacgccgatgtgcgtgaagcttagcaatgcttttttaatcttcacgtggtgattctcattatcattattctgtttatgcgggggaattatccacgttccacgcgaggcgaggacctagcgctattggtaccccggatgttctcgggttggccccagtatatcccaaaagcttatgtttctcagatatgtgttgctttaatcctcctcaatcagaaacgggacggctgcgtatagcctgtggcagtgattctcgaagggtcgagcctgtcggacatgtccgcgcatacccaagcgaagacaatttacatgtttgtcatatatttggcttttggccaacgtatccctaccaaaggctataataagcacggcacacggtggcggagattgccgcgctggacttcattggtgcgatcgcacatgagaactcttgacagatccgatcatgtaaactttgcggacgagatctctcaacagatccgatcgtataaacttgctacgatctatgcttgatttgtctagtgtgctcagcgtgaatcaagaactcttcattggcttagaggctgtcgtgtccaaccagacatcatggtactttggatcaaattgaagagagtgatattgatattcgtcagatgcaatgattactgtttctcctgtctattcaaactcattcagacaagagataaaggagctttccgaaagttggactattgaggcatcggatacctccgttcttccagtatttcctcatctctatgtgagcactgagcagttcagctcaatccacgaatttcgaagctgaacttctccggtcaacattatcttacttcactgctggcgcaatatcgctgtattagcaatttagattagcctttgagcatgaagtcattgaatcctcgctctccttcagccgtactccgtacatcccgtttagtcgatttgaaccatgacaacatcatccttacctatcccgcctgtgtttgattgcaccccttctccccaatagatagtaagttacatcgtgatacacatttaccccttgcacctccagtccagagagcccctcgtcgctgtatatcaccgatgcgagtaatagccgctccttccaagaatgccctccaactagttcctaccctcgacctcgagggaggtggttagctcgaaacttatctctcgcagtcttttgaaacaataaaccaccaagacgaattcttcattacgcctctacatgctcgcctttgcttctcgctctacctaatacgagatgtgtaagcacgaagcctccctcaacgcctacccttacattgccatcacttctaaacattaccttctatatgacttgcatgctaactcccctcgtgctcactcagctcgtcactcctgaaatcatcttatcagcctggttaaatcatattccatcctcctcgcgacttgaccctacttgcctccacaccccattgtcacatctcttcctcttcatttctttaccaatctacaactgtcaaccgcaaccgcttaaaacctgacctaaaataccacgacaggatcgacttcgatgacgacggcgacttcgaacttctatcagacgatatccgtctatcagatagcccggggattaggatagagggcggatggtagggtttgacggaacgagtgcataccgcgctttctgcctgagccagaaacagcaattcgccgaagcaaaaagcaacggaggatgaataagatgatccgctttccctgagagaagaagatctgtatcctctggtactactttgcctggacagccactgtccagattctacctggattactcgaagtcaagaatcggaaatacaatgggcctctctacactggacaaggatatttcgtcattgaaagaacagtcagtcgattcacgtcggccaatcctcggtgaatggtccggcaatcccaaaaatctcagtgaagtggaagagcagaacgcagtggcacacggcgacaatatcaacatggcatccaagccattacgtatttgcttcgggaaaacccattcagagctcacaaatgggaagcatcatttgcccatttctacgatattacatacaccgaggctaaagataacgcctctctacacaaaagtccccgccttcgtcgattattcagcctaaatgccagtgttcaatccttacgccgatttgcccaaccttgcatttgaaagagagcaaagtatacctaaggtgtaagcttgttgagcttcatagatagcccaatagaagcctgggctcttgagtgttctcatctgaatttcctttttatggatgtcacagccgcatattcggtcacattgctattgggaaccctagtgcccaaccctggaggaactctgctaacatcgtcgttatatagataccctattttcgcgcttgcagtcgcttgtttgatcacgttgctgtggcgagccctagtatcctttacgaagtggctctaccgatgtcactgtcaccatagctgcccaggttgttgcgtgtcagtcacattggcatgacgaacgctacctagttctagtcttcgccaacataaaaatgttatagtggtcttgccctattcttcccttcttgcagtctcattaaaacaccaaatctaatagccttgaaaggctgatggcctccgactaagtttatgatgttccaaccttggttggcaaacctataagattccaatgtacagtattccaatgtacacaataggcgaaggcggagtatcaactctagggcaagagcgatcaagctcgactagaactttcaggcacgcgtcacttcgacttcgatttgttgatacctctcgggctgttgttttctttttctttcacgtcacatattcacaccctcgcataatcgttatctatctttcctgatcattcacatcctttctttatctcgtctgtgattcgaacagttggatagacgtacaaaagcaatctgaacaaaatgagtcccgtcaaccaagagacaagctctggcactgtgcgtcgtcgtttatactcgctatcatcggtctttcgcccccaggcaaccaagagagctaggtacttacatacaaagaacgaccaaagatgaaagagatagcctgctaaccaagacatcagcatatctgatgcagtgcaggaggagccaacttgcctggaaaagatccactaccctgtgtttgatcccctggatcctcgtcacaacccagagataccgaccgtgctgtgtcattccaatgagcaacaaagttcgtcttcggggtcacgcagtccaatggcatgggtccaatccctctcaaagcgaactcttcatagagctcgatcaggtctattggcattgaaatcagggtttagtcaccatccaagtgaccgtccaagtgaagaagagccccaggagagaagctttgttagccccgttgctctcagacgcgaaattcagcttgaaagacaacgccacgcaatgtcatccggggggtacacttcggatacacaagaggacccgaactttggcgcccagctatctcgcatggaccttccaccgtcttcaccatcatcgaatgatgaaatggagcctcttgtccgcgtccagtctgtttatccgatgcctgcgcccaatcgatacgaatattctagccgccccgtaagtaatgtcagggtaaactcgacttccacactagccaacggccgtgatcttgacttccaatttgctggaaatgaagagttggaggcgaatatgaattttgaggatcactctaatcacacaattccatcgacagaaacgtatttgatacagcagacatggggcgttgcaatctctaccgacgaagggattgaaacgtccaccaaagaactggcagatcctcaatcagttcctggagagcagcaagcaacaaatcttcagcagcaaaatatcggtcatgcaagttcagatacacaaaacagcgatgatcaaccaatttcagttcccatttcgagacagtcttccgccgaagttcggtttgcatttccaggaatctatcatgaggcgctcaatgagtgggcgagacaacatggtagtccaaacctcagtcgacacagtcttgatctcattgaatacagtcccaatcccagtcatcacagttccagccccatccaacacagtctcagcccacacagtctcagcccacatagccccaacctcactcaacacaacctcagactctatgaacaagaagaaatcccgtgcgctcctcaagagccattcgaccgcattgtacttcaggaagatacacacagcggcctgcctccgtatcctggatacgatgaaggtcacatacctttagtattttcgcaaagtccaatcacacattctgaagaaatgcagccattttcctatcccaatcccctcaattgtatccccaacctgaattcggaagaaatatggtcgtctacctccgaaagagcacccacccagtggtcaagtggagaagattattcaagccgttacacacctgctgataccacatcccgagatatcacatcaacggaaatgacttcaatggaatcaacgacaactgatacatggtctccatggtccccgatggactccaaggtccttttccctagcccagtggaggatggagatgagtatttccttgttgacggcaaaagcagccagtatcccgacggaggcaatgagccagtcaaatccacacagcataccaccagcaactgtgatactactagacctcaaggaccgactgagttgatccccccagggatcatgtccctacgactcatgtccaatggtattaccgatgcagaattggaatttgtggaagaggatacagatgacgagttctatcctggaattgtacagccaagacagttttggtgaaatacctcgtcaatactctaacctgaagggccgcatgtctcttttgaccaaatgtattattacctgaaagatgttttcatcgcagtagttcatcccttcaacatattttctgtagacctattctttgtgctaatattctaagggggttgttaggaactccctagcaagacggtagatacctacaaccaaaggggggtccctggtacaatcccctatataagttataaccaactccagtagtccaagagggacgggaaagagaagtatctcatctatgagtctatcttggtagtcataagtttccactaggttgcaatcaatttgcaaataaggagaaatggaggttatcggtttgtttgcgtggtctcttactgcaagcgcaaagtaaatctgcattcataatcgcatctatacttcatggtatcacatatttgaagctacgtagatcactggataattgatctggctaaaatattcaaaaaatggcatcaccaccagcattcaacgccactcctgatagaatcaacaccataactcaagccatacccaaaccaacctgttcctttctctcctgccacacattcttacccgagcacgagcaaaccatcttatcattatcccacacacctgcactgcgcgcaataacaccaacaagggtattctcatcctcgcgcttgaaaggaccctgcgtccccttggaaaccaccatactccggccaataagctcccagattgccacaggccggtccaagaacacactaccccggcccttattgtcaacatccacggtaccgagaatgccccggcactccttggccggggcgacagtagcatcagcgccaagcattttggtcttcagagactcccagataccacccgtagactcggcaccgcgggagatatctcccgcttctcggatagttgtccagtatttgcccggcgcgaggccgttgattgtcaggtcgatgagggtcatgttcggggagacctggaccatgcgcgcgagtccgcggatgttgttggagacggtcgttgagtgtgtttcgaggatacatacggcggaacctgtttggtaatttgtatcaattgaggttgctcatttatgtcgcatgggatagtaagtagacaccggggattccatactgttggtagtaccgctaccacggaggatggcatcgcggccggtgctctcaatcgcgcttacgatggagctgggaggggcggtgccttcgatgaagactagctggtctttaaggtttgcttcaactttattgattcctgccgcggggtcagtttgcgtgaaggtttagatgctcgcgtgagatgactaccttccaggctatttagagagctggatatagaattcacgcagccttcacatgtcattgggaccgagaaggtcgtctagacataggaaccgcattagtactggctgtttgtgagtcatgtcgctcagacaaggctgacctggaatggttcaatcatggcggggaagagagtatgtgcacaattaaaagcgaaggatctaaagcaagatagagagaaagataatcttccagaagagaaagatcagaaggagactaaatatcagaagaaagatgtgcaatgcgctatacaaactcaaggcggggcgttggatttcaaatcgaaggaactcggcttctgacaaaacgtcattcccgaaccttctcccttcaacattccctcacgcaaaatgtcatcccgatgggcaaatgacgatccagaaacagaagcaattgtcgcagagcaaaaacgcgtcaaggaacaaagaaaacgcgctaaagcagagaaacaacgactagaagaggccaaaaaagctcaagcgcgcgatgccaacgccaatggcgagctaggccccccaacaaagcgacgaagactctccaacgacccagacgctcattcagatgatgccgaattgctgaagatcgagaaggaacagaaaagccagtcgactctactacgctttccggttggagaatgggggccctgcagacatgtggataacttcgaaagactgaaccacattgaggagggctcgtatggatgggtctcacgcgcaagggacatttcgacaggagaaattgtcgcgctgaagaagctcaagctggagaactcgccggacggattcccagtcactgggctccgggaaatccaaacccttctggaggcgcgacatcaaaatgtcgtttacctgcgggaagtagtaatgggcaataaaatggacgagtgagttctccgtggttgacactgtattgtctatatatgctaatcaattggttccgacagtgtattcctagtgatggatttccacgaacacgacctcaaagccttactcgacgagatgcgcgagcccttccttccttcagagatcaaaaccgtcctgctgcaggtgattggaggactcgaattcctacattcacagtggatcatgcaccgcgacctcaagacctccaacctattaatgaacaaccgtggcgagctgaaaatcgccgattttggcatggcccgctacttcggcgatccacctcctaagctgacacagctcgttgtgaccctctggtaccgagcgccggagctgctcctcggcgcggacaaatacggcacggagatcgacatgtggagcattggctgtatcttcggcgagctgctcaccaaagagcctctcttacagggcaagaatgaagtcgaccaggtgtccaagatcttcgccttgaccggaccaccgaactcagaaacatggcctggatttcgtctattgcccaacgccaagtccctgcggttcccctcgacatcggcaccttcttcagccggtaacccgcctctgctgcctcgttcccgattcccctatctgaccaatgcgggtttgagtctcatgtccggattgctggcgctgaatccagcctcccgtcctacggcaaaacagtgcctcgatcacaaatatttcaaggaagatccgcgcccaaaaccgcgagagatgttccctacatttccatccaaggctggtatggagaaacggaggcgtcatcacacgcctgaggcccctaaacgagggcaggaagcacccgagctggactttgcaggtgtctttggaggtgctccgggtggagataccggcgaagtaggggctggatttagtcttcggttgggataattgcttttttcaacatgaaagtaaataataacagattttgtttgattgtatttcaatctatattgtataataaagtctaccttgaagatatcttctggcttagtactgggtgtccctttaatatttaatcaagtagaacctttgccaatatatttgaaaaacatctagcataaaaatgacacagaaatataaaacagtctcagggccaatggctaactatagaaatgtggctatgtataactacggagtaatcaaggaggtaaacgcgcttgatagttcggctccaaagctgatcagctccgagcttctttttttttcctccaacctctcaacgtctggattcatttccttccatacttttatttattgatttatctaatattatttttacgatggcaaccgaacagcccatctcgtttgacgccatcattcaggctggtaattactcccttgccatctgacatctcgcagaatctgacccgtttttgtccacagatcgtcagaagaagaagcaggaggacctcgcaaacaaactcttgggaaagaaccgcagatcaagcgcgccaggctcaggttcgggcgctggcaagaaagtgcagaataaatcacagaatacaaagcctggaagcctagcaagcagggtcggagtaaccaaggtatgaccatggatgcgaccacatttgaagaacactctttgacaatttctcgcattaaaatttagcgctctgcatcagcgaccgtgcaacccaacaagaacaagcctgcgcccaccacgaacaacaatcggacacacggcaaacctggcaagaatgatcgcgtgaatgcggatcaggcccgggcagctttgcaatcccagaacggccaaatgaacacacgatcgggcaacgtcgcgcagaatagccgtccactcggtggcagcaacatgactattaagggtgcttcgggtccgttctttgtcgtcgggaggaactttgcgccggggacaacagcggccgacatccagtctgctcttgagcccataacaggtcccatgctcagctgccagataatagcaagccagccaagtgttactgcggcatttgcatatgcagataagacggccgcagagctagttgtggccaacttccacaaccagagggtaaatgccattcccgtttgatgatatcgcgagatggatgctgacataggctctctaggctgacgggagactgctcacaatgacccttaaatcgacgaagcccgcaacacagcaagaccccttcagtgcgctccgagcgcaagctgaccaggaacgaattcgagcccgtcgtggcccaagccatctgaacgacctcctatccgagaaccggggaaactcgccgactggcctctacagcgatgagatgatggtcgatgcgccggcgcggaatacccagaagaaccagaaccaacggagatggcgtcgttgaaacgcatggctagcgtttttggtaaggagtaaccactgcgcgaagtggtcgtggagatcgtgcttcttgcactctcatgaaatgtatgatatggtcacagcagtttatggacatttttttagcatctggagcagtgtgtttttgcatcagatagcggcgaacaggacaaaatcggacagaatattaatgttttattggctttttttcaacttctaggtcaatccgttcccattttatttattactgtcgctcctcgctacttgtttacacccccgagaggaaagaaaagaagtcaaactaaagaaccaagacaaatctgcaacaatgtcctggaacatcacttgttcagaaactccaaatataagagatatatgtatcccggtcatctcatgcccccaaggggcacaaggactagacgtgactgaagctcaatataaccaaaagaaaagacacaaaacggacagaacaggcaaaaaaaaaaaaggaaaaacacgagtataatcaagtaagacgagaatatatgaccaggaattgatctccagctccctatgtatggtcaaacattccttgaagaatgattgatcaaataggatcagtgcatggcggtattgcgtatgctggattgcaaagtggcacatttgccaatatttcggggaggtcggttcccacgtacatagcttcagagttattaggcacactcaaacaatatagcatatggtgtagccagagaccagatagccgcaaacccgtagaagcattgcggggcccacggcttatacaggctcgaatatcagtccatcgggggaggagtggctgatcattgtggaagatgttgacttgcaataccacattatctaccgggacctcaccagccgctgtacccattcttgttgtaccagtgacaggcagaccggcgccactcagtcgttcaatgtacagtctatcggactggtggatcttcattgctatagcaccagtatcctctataacattgaggtgtacggtatgttgccatgtgtttttttgccatgtgttaggatttcggatcgatacgataaactgtttgatgttaacatagattctgaaatctcacttgggaggtcatacctcatgcatggcgtaccctctctggagcgggggcatgtagaagaacagatacatcggttctggtttgtagtcgtccatctataggtcaagttagtactgtatgcagaaggatatttctatatcctcatgttgggccgacttgatataacaagagatctacgtatgcatgaggaataggactcagagccgttatgtattcgaactcactccttctacccaaatacccgctgggccaagctgcctactaagagcgtaaaactcttccatttccatcttcttgggaccgccaaccatttttccgtgtgcccagtaagtgaccttctctttatcccagacaaggtgcccggaccggtaggcagccatgatggctatcacgttgggggtatttccattgtcatttcccaaatagttctaaggccattctgaccccttctgtaacctgcgaccgactaggctattgtatagggggttgtaaattggcaataattggtggaggtcggcggggtggtcatttcttggcacttatatatcatatcgccagtggaatccagaaggttggagtcttgagtcacttatttttttatcgtatatatatggagagctgtacatacaaagaacatttttctggtaaaaatcttgacctctaattacttcattcttgaggtccagcattgcggcggagagagtcgacccctgtaccgcgtagtctgttcgaggtaggattgatgcctggaatcgcctaatatctttcgcgatggtatcgacggagtgaacttgccttccgtctgtcattatttattgttatggccccactagccgacgcatttggtggtcttctagcttctggtattctgaagctagatagtgttggctctctctcgagctggcgaatgatcttcgcgattgaaggcattattactatctgcattggtattcttttatagagatatgatcagctccgagcctaggggtcttagctgggaagtcgttcaacgccttgattgtctgaagaaggtcaaaacaagctttgatgagttgccactctcccagcggagggttcgcaactgatcttcagctatttctgcttacactgccgcagaaagcaccaggcaatcccaccacttgttggcctaaatcgagtttgaaatgagaagtagatggagaaagctacagcgaccaagaagtatgagtattcaagagctataccgtcgtcacacacttgctacagcaagcggaccttaacccttataagtatttctatccttaggggaataaccggcataccaatataccgtgttgacccacattgctaggcgaaccagttagccagataaaccaagctgattttccaggcaatcaatctggagataacttactcatggcgtaaatagcaaatgcttctgcgtccttgtgcccttgtgtattgccgtttttgtcaaggccgtctgtccccttggcgattcgactcatacacgcaaggttcagcgaattctgggctgggctagtgcatttcacgtcaactggtatcatgtcagatatatctcaaggagagggagactcgaagagaaggaatgagaaggctcactcagcgtcttgcttcctccaccgacgaacgcctccgcgtgcgtcgactcgtggatcacggttgacacgaggaagtcggacagccactttataccccggccctcctttccaatgaagtcaggctgagccagcagtttctctatggcactcttctggttcgtagttgggctcgagccgatttcaacatgcaggtcgcggtagtgcagaccgctccctatccggctagtttcgacctcagtccatttgtcgaacttcaacgaacagaagaccatggtctcctgaactagaccataaatcgctccgtacacatacgccttgattcccggaagcgcgggcacggggccgaagcgtgtctgatcggccccgtcctgtagtgcacagatagcttggtatggcacccagatgccttctttattcggtgtacctttcgtttgaaagatccaatagacgtatgtcccaccttttgcgagagaggctatatatttgaggcataattagcaagggttgaaggtgcgggtttttacctcaccctcggatcgatggacgggtagatggatggcccttacggtttgtcttcccggtagctgatcaacatgtcagcagttaggatcggggatccagaaatccagggagggatcatcaccttcagtgtatgtcaaacccgcgctgtctctctcggagtacacatcggcgtcattgcagtagatattgatgtacgggaatccaccccgaatccaacggacgggccgacctgcaaggtaatttgcgtattgcgattgtattgttctggccatgtctctcgttcccttgagcttttctaggccgttcttgtttcgaggatcgtcagggccaaagtagtgctttgtgataaacatgacgtaggaagcgaacgcattgtgttcgtcaaaagtacgctgcgctctagtcgccttgctagccttgaggtttccggagccgtcctcgttgtagaggctgatggctagctctagatgggctaccatgttggatatctgccgctatgtatcagcatcatagcagtagggccaggatttgggtaacacttacgatagcgctagcatcttggatcgcctgggcgagggttcctgagaagtcggaattgctgcaaccgaagaaaacttcccgcttctcgatagacctactggataatagggttgcggatgtttcattaaaggagacttccttctccagagccagtgctgccagtgcggcagaaaatataccagcccataaagcaagccacccagagagggagatgagattcatgccgacgatgatttacttcgtagtggcttccagagagccttaggtgatgcaacactcgtacggcacatgcaaggtacctttagaactttctaaggacaagttgaacgggtccccgctgaattaacagaatgaaaataggcagatacttacctccaacgaagaaataattttcaggagtgcgggaaaactattcgaatatttcaacattacgatatctaacctcggcctcatgatgtctctgcgtggtagcattctccttcacgcgcgacctgaactgcgcaccaggtagaacaaaaaacaaacatttgttcggccttgcagcgtgggaggctagctgggaggccgagcttgatgcaacaccaactataactagtatagatctactgaaatgagagcagtcaggcgtccagtgatgcaatctacgtaagactactattatgcaaaggagggggtcgttacattccgacggagcggtgatatttgagattatgttgtacgcgaattatgcttatcctttctagttctagtgaaagagagaacaattttccattcaagagtgtctgtatagggaaatcgatcatcagagctgacctctcagatgatcgacatctatgctccaaatttaaggctcgcagtcttatccaaagagcgtatgtcagcactaatgcagtagcattgtagggtgtcatgggcgcctgttcagctgcaggggtcaagggcagagcggtcctgatatcacacggagccgacaaacaaatgcttgtttatcgagcttcgctacatagacatgtcgatgctcccttcgtttttcccccacccttctcctccaacgcatggcaactgccttccagttgcactgtttcccctgtcctatctttttgtcttgaaaatccaagatgccgtggacgattctttggacggcggtagcaccggtcctctgtgtattactatcactcggcacaccggcctcggctttgagtacccactctgaacgcctagctgcagctctgaatgccccgggtgcgttccagtcgcagctcaaaccatgtccagcgccgtgtgctagccacgagccccagcactggactgtctatgcttcctttgaccggctctccttctgccatgagccaattcttttcgatatcgccattcacactcctgtgaatgacttttctaagacgctaaagtttcgcgcctgcaccacaggtgatggctgggatgagtccaggaatgccggtacaattagtggaacggtctatgcgggcccctccgttcgggagtccaaggtgacgctacaggttgcacaacagaaatctgcaggagcagctgaaggcaccagtgaggatgtaatcaccgtgctcacgcaggttcaggcatacctccacgcagggatggactgcaccaagaatattatgctgggttactacaagggggtggttgtcggcgtgtatgccggccaggcattgggtaaagctacagcttcatctgtgatgggccaggtcctctccaagttcaagggagcggctcccgcgaccacgcttacacagctctgcggtgatcagcgtgacgcagaccatgtctttggtattgccacttcaaccgtagcggacctttctgctgtgcaggccgcactggtatcatggagtcaagggaaatgtgagagcggactcggcgacgcgacctcactcccgaatgtcagtatctgggaggtaccgcaacatccagtcggaaggaacaataccacaacttcagatcctaccggtcaggaacttgatgcgcccctcctcgctcgcacagccaaatactgcaaaaaaaggacggttgtctcgggtgacatctgccagtctctagccaaggcgtgcggtatcaccctcgaccagttctacaagtacaactccaaggaaatgtgttcgaacctgaagattggctcgagtgtctgctgcaccgacgggttcctgaagccacagccttacgataacggcacctgctatacatacacgacacagaccggtgatacatgctacgatatcggccttgcctggagtctgacggccaaagaccttgggaaatttaacgatggcaccacatggggctggaacggctgcgacaacctgggtcacagtcagaacatatgtctcagctcgggacaccccccgatcccggccgttctgcccaacgctatctgtgggccgcaagtgcccggcacgatcttggacagccctttcaccaacgcctcggaatttgccttgctgaacccgtgcccactgaactcgtgctgcaacatctggggccagtgcgggattgactcaagcttttgcaccctgtccaccggccccacgcggaatccgggcacatcgaagccgggaatatacggctgcatctcgaactgtggtaccggcattgttaataatcatgacggtccttcgggtggctaccagcgcgtgggctactatgaggcgttcaactgggaccgtaaatgtctgcacatgcgtgcacagtggtccaacacacttgactacacccacatgcactgggcgtttggttctattggtgaggacctgtctgtatacgttaatgactcgcacagccagtggtccggctttatggatctgaaagacgtaaagaagatagtttcctttgggggatggggtttctcgacggatgtgtcaacctacgacatccttcgcaaagccatggcccctgacaatcgccacaagttcatctccaacctcgttgcctttgccaatagaacgggtatagacggaatcgacattgactgggagtatcctggggtattgataaccttttattttgccctttcggtggtacgcaagctgctgacagtaggtcttgtctcatctaggcgcctgatatccccggaatcccccctggcctcaatacagatgctcccaactacctagcgacgctcaaggcactacgacaggagctaccagacaaatattccatttccattgccgctccagcttcatactggtatctcaaagcgttccccattagcgatattgcgaaaattgtcgactacattgtttacatggcttacgatctacatggtcccacccccctcccttcccccttcccaataccttagaggtagtctactaacatttgacattgatctccaggccagtgggattatggcaacatgtacacgcagtcaggatgcaaaagtggcaactgtcttcgcagtcatgttaatcagactgaagtgcttctggcacttgctatgagtaagaatctggcccccttgttcatcggcacatgtaattctagttgaagaaagttttactgatgtgcccatcggtcaacagttaccaaagcaggtgtgcattctaacaagataatggtgggtgagtcgagttacggaagatccttcaagatggccaaacagggttgcacaggaccagactgctttttcactggcacaaatgagacctccaatgcgaagccaggtcgatgcaccggtaccgggggctatatctcgaacgcggaaatcaaggagattatttcgcatggcggtgaatcggtcaagacctggtacgacaaggacacggcctctgactacgtagtctatgagagtgagtatcttatttttccgacctctgccatcatccgcactcagcatcattcgtcaaggagaccttatacttatggattgagatacgcagatgatcaatgggtagcttacatgagttataacaccaagcaggcgcgaagggacacatggaagaaacttaatttcctggggacgattgactgggcggttgatctccaagacttcaatgtggctgacaccgtcggtcctacgggagactacaacaagtcgtcgtgcatcaatgtcttcgacaacatgatctggaactgggtcaacccggtcattgatgcccccgtcgggtgcacaaatcttatccaagcgtccccattggcgacaacggtgacccgcacggcatacaccacgatcacgctggtgtccgggggcaccgtcagcactaccattgtgtctactgccttcctcgtttctgaggtcgattaccagccgtttacgatcgcctcctcggatacggagaatgggaccatcatcacatacaatcccatcccgcgtgtgacgccgagccccatggggattcaggtgccgaaagggtgggcgatcacttcgcccgacggcgaggtggatggtccgtccaccaccacagacttggttggtcttcccaccaccaccaccaccaccaccaccaccgatgcaggagggttcatagtctacattacatggcagcccacggtaagctacagcctgccatcattcgtcacacccaaaatccctgcacccaccatccctgacgacgacaactctcccacccccatacctgatccaggagtaaccgactgtatcggtgatgcctgcactaaggggcctgattgcaccgacagcgactgtacacgcggtggagactgtaccggccccggctgtacccgcggcggcgactgcaccggtccaaagtgcgtccggggcggagtatgtacaggccacaactgcgaggaagggggtcgctgctcaagcgatcactgcgtctcgggtggtgggtgctcgggtgccaaatgcaacaaggggggcggatgctcaggtgccaaatgcaacaagggtggcggctgtgtgaaaaccttactgaataattgcagcccgggaccctgcgtcggtccgtcttgcattgatatgagctgtccgtggtgcgacaacggtattaccatcacggttcagcctggggggaatcctgcgcctacacccaggcctacctgtctgaacaactgcccgacattaccttcctgcgcgggcggcgccacatcgtgcaacgagccgtgcaacatcaatcgctgccccgcgaacagcatgccgaccggaaaggcctgcacgagcttcaccactgccagtgactgcacggtaattatcagcagcacggcagtccataccaccccgacgaggagcttctcgaccaccacgcgaactcgttgcgagacggtgatcgactgcgacgtgcaagatatgacagtcacaaccaccatcaccaccagcgaggtcccggacgcaattgcctccccaacggggatatacgactacgagaacgactctcactataatcaggctgtgtttgcagccgttgcatccgactacgatgagtgggaaaggaccgcagacaccaccacgaccacgaccacgactacgacaaccagtagcacacctacgactaccacttcaacctcaagtcctaaccctaactacccgaatgagttcatgatattgaagtacgaggttcacacggtatactttgatttgagtgagaagcactcctactcttggtccggtgactactacgcctacaatcaggattcgacaaccgagaacgtatgcaccaactcctaccgtgtaactggccctatcgacgcgggcgctagtgatgattatcctgcatcactgggtacttttgatctccctgcacagtacacgggctgcaagtactccggaagtaccgactctgtagggtcggttacatgcggctcaaaaaccttctcgtgcagcaaattccaagattatgacgggaaaaccgccacgtttgattgcggtaagactacagccgatggtggtagtacatatatataccattactactatgaggcgatccagtgtgtcatcactaactaaatgatccccccggcgttgtgatatcaaagaggataggggaattctacaataaaagaacaattataactatttgcgttattatatgtgtttttcaaggctcaaagcagatcttcctttaacatctccgagtttcagaagacaaagtttgaaattagcttacagtgtcaaaactagagctagaaagggccagcggctatataagcctaaaactcatgcttttccctttgcattttggacgatcagtctgcgctctgaataaagccgcacttcgtacccgcatcttaagagcctcccttcacgtggctttccctcttgctttcttttaaagctcagctacaggcgacgccctagaggatttctatggattacctggatgggacaaaatttcgggcccacttatctcggtgtacaatagataatactaattagctagtttgaggatagatagactcggcctcttgattgaatctgcctatgtatactattgctagtggctacagctagtactgtgcttattgatatagtctttagggcttggatttccgagccataccatcttaggactagcggccgataaccgtccgataaagatatgatcacgtgcagtggagcttccgcggagagattgagagaaacatctcgacttggcgcaaggcaatagaaggagtgtttggcccggtcattttgtttacctgccgcagacagttccattgttgtatatctgatgataagaacaattactgccccccaaacccgagccaagaatgaaccagaccacgaggcgcgtagcgtcgtacgtcctctgtagacctcgcaacccagtacttctgagatgcccagggagatggaactccacatttgaacagagagaatggtccacgccgctggcaaaaacattagccagtgtcatgagggtaaatatgcacttagctttaacctctctgctcttttgctgatcattgacaccgcaaattaggtcacaggtcccgtaccaatcgcggcgttcatgcgtcaggtattgacttccccagatggcggatattatacaactcgaggggagggcggaggtgtcttcggcaaaaatggtgatttcgtaacgtcgcccgagatctcgcaagtctttggagagttgatcggtatatggactatcgcggagtggatggcgcaggggcggacaaagagtggtgttcagctgatggaggttggtccaggaaaaggaactttgatggatgatatgctacgggtgggtagttgcacttatacctgtcttccttttataagaaagagctcattggactgaccacgatttctataaccaacagactttccgaaacttcaagagcttttcttcgagtgttgaagctatttaccttgtggaagctagtggaactctccgagaagtgcagaagcggttgctgtgcggcgagaaggctgtgatggaggagacagatatcggccatcggagtgtgtgcaagtacttcgatgtacccatcgtctgggtggaggatattcgtcttctaccgcatggtgagtgatgctttcaatccggttttacccttttgtctgatgctgaccaatgacatcggcgacacagaggaaggcaagacacccttcatcttcgcacatgaattcttcgacgcgcttccaattcacgcattcgaatctgttccaccatcaccagagaaccagattgccaacgagccaaggaagatcatgactcccactggcccagtagaactacataatccgcccaaacacgcaaacaccccgcaatggcgtgagctaatggtgacattaaatccaaaagccgtggaagagaacataaaaggagagcccgagtttcaattaaccaaagccaaagcttccacgccgtcatcgctagtgatcccggagatctcccagcgttaccgagcactcaagtcgcagccaggcgcgaccatcgagatcagccccgagagccgaatctatgctgcagactttgcgcgccggatcggtggtgactctgcttctgcgcttgctgctaaaaagacctctccctctagcccaccgccgtcatctcagaaaaagactccatctggcgcagccctgatcatggactacgggacattgtcaaccattcccatcaactcgctgcgcggaatcaaaagccacaagaaggtgccaccactctcggaaccggggcgtgtggatgtcagcgcggatgtggatttcacttcgctggctgaagcggccatcgaaggcagcgacggcgtcgaggttcacggtcctgttgaacagggtgatttcctcgcagccatgggtattgaggagcgcatgcagcagttgctccgtaaggtgcaagatgaagaacacaaaaagacactagagaccgcctggaagcgattggttgagaagagcggcggatcaatgggacagatctataaggtcatggccattatacctgaaaatggagggcagagacggcctgttggttttggaggcggcattcagatgtaaccggcaagtataatagacccaaagccatctcatgtacaataatcacatctttcatcaaatagaatcacatggactcgccgaacatacagaaacaatcaaacagagctcgtcggccccaatatcccagaataataaaaaaactaaaatgtaaccatcaatgcatctaagtggtatctctcatatcaagttcgttaagtctcatgaaaaaagcagatgcataaagcggccgtaaccccaccatcccaaaagggccaattcagtattcctcccagatatccgcagcataagccgcagtcagcttagtatcattgccatacttctgctgccattccacaaacccaccctcgagcacaaatacttgctgcttctggctctcttccgcaccaaacatgctctcgcgctctcgcagatagcgaagggcagcagaggggccacgctgctggctgagtgcacagtggaatacaaccatttccttgtctttgagagtgcggataagctctggcatgcgcacgtccagtgttaagctcgggacccaagttgatgagtggatatggccaccaacgtggtctgttccaactgtcaactgatagtctttgatttgactgtatggcaaaaaaatggttatttacctgagtctcggacgtcgacaatcgccaggctgcttggttcgccagttgagagcagtgtcgctagaacatcgcggcccatgcgggggagagttgcgattgagatggatgacattttttttgtcgaactctgtgaactgtatatataaagagagctattcgaagtgaaacgagggggatatggtaattttacaagattcccaagattgcaggtgtgatatttacgatctcgagaaaaatgactctaaagcacacgacacgtgacctataatttcctttccaatcgggagacaatgattttccgtcacgggaacttcgagcacctccgaccctgcgcgtctacctcgattaatctctccttcccaagcccaggagacagttcaatccacccccatagacctgctgccctgacacgagcgagtccaaccaaaatggacttccgcctcctagcccgcagcctccgcgccaggccaacaccatggctccaacagcagacccagcttcaccgcgtcgcctccctcgcgaacggagtgcgctacaattcctccgcctcatcaccaaccccacccttcaaacccacatctcccaccgaccagccaagcacggcccccgaggcggcgaagcaagcccaaaagccgacctccgagccaagcacagccgcccccagggccgcacagccagcccgcaaaccggtctccgacttcgacgacatcctcagcagactcgacctcagtaagccccgagaagcaagcagcgcccagcgtcggatcttctcagactcgctttccagggctgtcggcgaaggcgcacagagcagctaccgggcgcgctcgagagtgcctctcccttcacgcaaggtcgagctgaagctcgggccgacgcttggtcgacagattcaggttgagccggagcgtggtactgatctcggtgctgcgctgcgcaggcttcaggctactatctcgcagaatagcgttcggcatgatgctcacgaacagaagttccatgtgagaaagggtatggtgcgcaagcagaagaagatgttgcggtggaagaagctgttcaagttttcgttccagggcactgtgaagaagattcagcgtatgcaggcacagggttggtagttttatgctactccttttgctttgggcttttgtgctgcggcttgtctactcggcttgtatgtatatactgagaaggctggtgtgggtgatggactgagtgggcagagtggccttggcctgaaaattggtgttttcttttgttacttgtacaactattatctaggtacttgatttttctgttgaatttggctcttgcattagatatggaatgaatgcatcggatttgtttgactcgattacttgggtatagcatcattatatgtaaagcaccggctttttgctagtggtcaattctgcctctcaagttaggtacactgtacatgtcgtaagcgctacactatatgtacctagttcctcccagttctcaatattaatccctctttccagttggcaagacatatccacttccaagcccgttcccattgccattgccaatagtagggccggagtaaccaccatagccattgttcttccccccattgccaaaggtaacaccaggactcttcgctccacggacgggggtcgcacccaaaagcccatctccatgccaagcggatcgcccacgccaacgcccaccattgcgctcccagaaaagcgcaactaaagcgccaacagaggccgccataacaaagaacaccagcttggaaaagaaagacccagagctcttcccagacccagtcgccaaagccagccacgattccaaagcaggccgcaccggccacccaatactggcaccgccctccaaccatgcaacgtggaaagagaaggtaagcggctccccacgcacaaccttagtgccatgcccagcagtccacggctcgcgtgccgcctgagcaagggcaacaggctcctcgtcctcgtcgagcttggcattcttgccggtgttgtcgaactcgggagtcgagtatgcaacaccgccaaccacgaagccaggctgcagagactgaccaccgcgagttttggtgttttgttctgcagccgcgtccgaggccatgttgtgcattacgacgttcatatccgtccagatgtgcaaatggctcagttggagtgtgccctgcagcgcgattgtgagaggcgtgaagggtggcccgttgtcggctagtgcggagagggtgtctgcttcgcctgacttctggtccgagtctttgtccgcgtgctctgcgctggtggatggtgtcagcggcgctgttggcacgcggcagctcattggtacatccgaatggacgtagaactcgaggaggtggtacatctcatcggagagggagtcgatggtgcatgttattgtttcagatatgccgtagtggagagagagagggcgggcggtttcgttgcaggtcacgaaggggacgtattggagtttgccgagattgtcagtgacctggatgttttcgtagttgctattagctttgtgtttcctggtagtctgcgctattgtcttcgtgtcaggagacggtaggcagactggtggcgcttacatgttctccttccctgcaggtgtagaacgagcaatggttagccgtactctacagcttgattgaagagtggtctcacatggttcgattcagacatgacactgggatatcctctctcaatttgtatccgtcgctgttgtcattggtgctccccgcaagtgcgttggttggccacaatgcgcctgtcaaagacagcagcgctactgctgcggaagacgggctcaattgacgtaaaagagacattgttgcttttttctccaatgatttaaggagaaaaaccgccccgcgtcggcaagtttcagtgttcgaggattgcgcaggagtgaaggacggaggtgtacccgcgttgcggagttgcggacaacaaagcgggtttccctacgatttccccttgctgctacttccaaccacctccctacttctaattctttcatatctaacaccgaacgtgtttcgcattccattcgaaagcttacttggtaacggaatttttgggaatcattcatttcttttcaaaggaaaaatatgtggaaaatcgttgctcgtcaaaactacacatcccacagtgcttcatgaaagactaaaacactctaagacagcttggccttctgcttgaaagcaagcaacagaccactggtggagctgtcgtggtcagcaccctcgcccttggtctcgagctccctctggatgttcttcgcaagggccttgcccaactcgacaccccactggtcgaacgagttgatgttccaaatggcaccctcggtgaaggtgacgtgctcgtagtaagtgatcagagcacccagggtagagggagtaatcttctgagccaaaatagaggtggtgggacggttacccaggaaagtcttgtgagcaacaagctcctcggcagtgccctcggccttgacctgagcaggggtctttccaaccatcagagcctcggattgagcgaggaagttagcagccagcatacgctggtgcttgccaccctcgacggggttgtgcgactcagccgccatcaagaaatcggccgggatgagcttggtgccttggtgcagaagctggaagaagctgtgctgcgcgttggtggcaggctcaccgaacaagataggtccagtggtatacttgacgtattcaccggtgcgagtgatggcctttccgttgctctccatggacagctgctgcaggtaggcggggaagcggtgcaggtactggtcgaagggagcgaccaggtgggtttgagcaccgaagaagtcgctgtaccaaacgctcagcagaccaccgagaacgggaatgttcttctcgagcggtgtttcccggaagtgcttgtccatggcctgggcaccagccaggaactggtggaagttgtcgtaaccgatgtacagagcgacagacaagccaatggcactccatacggagtaacgtccgcccacccacgactcgaatccgaacatgttcttggcatcaatgccaaacttggtgacctcgggctcgttggtcgacagagccacgaagtgcttagcaatgtgtgaatcatccttggcagactcgaggaaccaagccttggcagtgttggaattggtaatggtctctgcggtagtgaaggtcttggaggcaatcaggaaaagggtggtctccgggtcagagtgcttgagcgcttcagcgatgtgtgtgccgtcgatgttggagacgaagtggagcttaatgtcggggtggccgtaaggcttgagagcctcggtgaccattacagggccgctaggtgcagatgtcagctacaattcctgcttaaccaaggacgagaaagcttacagatcggaaccaccgataccaatgttgacgatggtgttgatcctcttgccggtgtaacccttccactcgccgctgcggacctgctcggagaactccttcatgtgctccagcacggagttgacctcctcgacgacgctctttccgtcgacctgcatgggctcattggcaacattgcgcagagcagcgtggtagacagcacggtcctcggtgaagttgatgtgatcaccacggaacatggcatcacggagctcctcgacattggcctccttagcgagttggaccagaagagaaacagtctcctgggtaaggaagttcttggagaaatcgaagaggatctctgtgttgtctacggtgttggtgaacttatggctgaagttctggaaacgctttgggtccttctggaactgatccttaagaactaggttacgtcccaaggtggtgtggtgctcctggagctccttccaggcgggaaggtcgctggtctgcgaaaagccgggcatgatgacgatgaggggttctatagacaagagggtcagtgcggggcaagtgaaatatgaaggtaatgtccaagtatgtcaggtttatgatatagaatgaaacttataaacatacattgaaagtagagtggatgatagagaggaatgaagaaaccaaggaaaggcaggaaaactaatggcgtcagtcgcatccggcgcgttggggtccgagggggtcgtggggcaacatcatcattaccgcattcggctgttatttcacttgttttctttattaaagaggttttggttgtttgacttgtttttatctagtttgctgctggaattattcttcttagtactgctattatccttctcattggagcctttcacctaaaacctctccttttgttctccgcaggtactgaaaatgtatacggagtacccggtataccaattcggacacctgtaatttcgtactccataggctattgcttttactcttctgggaccaattcgattccagcgcgtttaattgtatagccgggcattggaaattgaacggctatagcttttttgtagctaaaacagtcctattctcaaggaaactaatgtgttactcttgataagatgatactagttactactgcaagtctactccgtatactccgtatgcattgcaatataccttccaaccctccaagggccggatgcatgggaatttccaatgctctctgtattgttttgagggctaatagaacctgttcatagaggatatgcaaaaagtactcctacaagacataacatgaatagattcgctggacggctaaacatggaacgtgcacgggccaatagaaaattcaccgcccatgtcaccgcccgagcttttttgttggcagctgatagttatcggtttgaattgcgccttgatcaacctcactttcttacaggtgatacgactggcttgcatcatgtacaatccttaccaaggtgagtgctatcttctctttgaccttgataaaggtcttgatgcttcggaaaacctaaaactaactcttacctagctccgggtctttatggacgcgcgcctgactacggtgcctatggtgcgcctccgggcatgggtgagttcactcctttcgcgcattaatgttattaacaatatatactgaccagtctcagcccctcctccaggaatggctgctccaggcactgctgcccccctcggcatgcagcaagcaaatatccagcctggtcgtccaggaagcttcccgcccaacttccaaccgcctatgaatatgccaaacatcaatttctctgcgccggtgattcgcttgggtacttcgggcccgaacaagcctgcagctcaggagaatggtcgcgaacggggacccgatgctcctgggcgccgcggtggtctggggtcgatgggaatggatacccagcgccatcatggtcgcgagaccatgatgcagctccagccacctacacgcgacgaggtcgtgcgcaccatttttatcggtgggattacagagggcgcaggcggtgatgatggcattgagcgcattctacgatctactggtatcttgcgtcgctggattcgcgcgacagatgctgatgacaaaccttgccggtttggctttgccgagtatgatgacccggagagtcttgagattgcggttgaaaccctgaaggacgtggaagtcccggtcaagatacaggtacccctcgccgaaggcgatgaggaacaaaaagtcgaaaagagcaagcttctagtgcgttaaaattccctccctatccgcaaatctgacttctaacttgtctactaggtcgtcgtcgacgaaggtaccctcacctacctagagcaattcgagtctagccgagccgaacaagaccccgaggaacgccaggcacgtttcaccgctgcgcgcaacaatctgaacaaagtcttgacaagcctcttccatcccacagccccgctgacaaaggaggagatatcggcccttgatcgggaaggcgacacggaaatgaaggacgccgagcctgcaaaggatggggaagtggtcactattcccatcaccattgaagatgagctggccgatatccccccagaaatgcgcgccaatgtggccaaggagatttcggctttccgtgaacgaagcacccgccgcgacatcgagcgtatgaaacgcgaggaagagatcgagtcaatggagcgtgcacgcaactctggctctcggatcaatcgacttgtttcgcccccggcatccgctcctagtggccctgctgccggtatcaacggtattcccttgggcccacgggatcgcaatgtgatgaacgcaccttctggtccgagggcattcggtgtgcagattcctaaggattatcagaagggagttgcttttgtcaatgccgatgccctcaacggtgacgacaactcggatgctagcgacgaggaaattgaacgccgccgacaggatcggctcaaggctgaacaagagaaggaattctcagacctggagcgccgctggcttggccgtgaacgcagccgaaccgcagccctggagcgagagaagaagcgtgaggatgaggaagacggaaagttgcaagctgcgcacgatgagatggaagcacgacttaacgcctggaacgatgatgtcgaggacacccggaaggcagtcgattactacgcagatcgcggtacctggctccggacccgtgcagccttccgttctcgtgaggcccatgttgacgatgccgatcgcgccgctgaggatcgcgaacgtgtgcaatccgccaagcagcaggagcaggctcgcggcatggccgacgacttcctcgctcgccaggccaaggagctcgagacacgtccccaggaggcaccgcgcgaaccccagcgcttcaagctctctcttggagctgccgcgcagaaggcccaggccgcaaccagccggcgcgcagtggccgatgtggaaggtctgctggaggacgaggaagagcctgagacaacaacccgtcggccactcattccgatcaaattcgactcggcggccgaagctgcaggtctcactgacgaagaacgtgctcaggcggcccgtcaactcgcagcagagattccggctgagaaggaaggcctgtggaactgggcaatcaagtgggaatttgtggacgatgctatcatcaccgaccaactcaagcctttcgttgagaagaagatcgtcgaatatcttggtgtacaggagcaaatgcttgtagatgtggtggaggaacatgtgcggaagcatggatcgccccaggagttggtggagcagctggcagaagtgagtatttaccccttggtcttcttcttgacacaatttactgacctcaatcccctatctataggcattggacgaagaggctgaagtcctcgttcgcaagctttggcgcatgatcattttctgttccgagagcgagaaacgaggcctgtccttgtaggttgcacatgaacgacaggtgtgcctgatgtttccgggcttcactgagatacgaaatacaacatgtacacaaaggaatagctagtggttgcatgtacaatgccaaattttttgaaatctcatactctgggggttttcaacaggatctggtctagtctgcaggtaaacaagctcccacgtagcttggggtaagtcacggagcagctccgagtatatatctgggctctgattggtggaatgacatattttcccggcatttacaattttccaccaataagatcgggtctgctgcaaatgactagggaggagagaggggtgcgggataaactggagatggcgcgggggaagattgttgctgtatatacggagtaggatctcgatgggcttttgtaatctcttctcggtgatattcttcgtctcttactcttccttgtgcatctttgagctgccaaaaaagggtagaaccgactttcgattctataccccggatatatacaccccgcatttcaggattaaccactgtgtttctctagcaccgacctgcgccagcaatatttcaagccattgacagaagtaaagcctatttctatcaccacaagtaatagccatccacaatggttaaaatcactggcttcaccacacgggacgtgaggttcccggtacgtcaatcttgcagttccatatacccaatgcactcaatactgacaagcccaccatagacctcgcttgataagaccgggtcagatgcgatgaacgcagcaggcgactactcttccgcctactgcatcatcaccacagactcagaacactccggacatggcatggtacgtcacaccatatcaccaactcacagcaatccaattaacccaacacctgcagaccttcacaatcggccgcggtaacgaaattgtctgcgcagcaatctccctgctcgccccaatggtcgttggcaaagatctagacgagttgaccacagactggggcaagacctggcggtacctcgtctccgacagccagctgcgctggatcggccccgaaaagggcgtgattcacctcgctctcggcgctgttgtcaatgcactctgggatctgtgggccaagaccctcggtaagcccgtttggcgtattgttgcggacatgacgcctgaggagttcgtgcgttgcattgatttccgctatatcactgatgccatcacacccgaagaggctatcagtctgctcaaggaggttgagtcggggaagcaggagcgtatcaaggaggcagaggctagccaggctgtccctgcttacactaccagtgccgggtggttgggatacagcaaggataagctgaaggtgttgttggatcagagtgttgagcagggatacaagcatttcaagcttaaggttggggccgatttggaagatgacaagacccgcttgcgtattgcacgggaagctattgggtatgataagggtaatattttgatggttgatgccaaccaggtacgctatcactaccgattccgtttcactttcgagtcagactgacactgggcacatgaataggtctggtccgtccccgaagcaatcacctggatgcaagagcttgcagagttcaagccctggttcatagaagagcccacctcccccgatgacattctcggccacgctgccatccgcaaggctctggccaacaccccctacggccccgtaggcgtcgccacaggcgagatgtgccagaaccgcgtgatcttcaagcagctgctgcaagccaatgccttgactgtcctgcagcccgacgcctgccgtgtcggtggtgtgaacgaggtcctggctattctcctgctggcacgcaagttcggcgtgcctatcgtgccgcactcgggtggtgtcggtctgccggagtacacacagcacctgagcacgatcgactatgttgtcgttaccgggaagaagagcgttctcgagtatgtggatcacctccatgagcacttcgtccacccatctagcgttaaggatggttactatgccaccccgttggagcctgggtacagtgtggagatgaaggctgaaagtatggatgcgtttgagtaccctggtcaggaagggaagagttggtggagatccgaggaggctaagagcattatttatgggcccagggttgtatagatttggtaatggcgagtgctgttgctctagacgatcatgtgtttatgtatatcatgttaatagctttcaaaaataggtttcaatatagtacatactcactcggttcagattggctgtggatatatatagagggctgtctccctagacatgttctcaggcgagacttgaagatagagcttgcgcaacttggtcaacagatgtggatccccaggatcaattcgactttttaagtaaatttgggatgactagcgcattgaagttagaatcccatgaaactatgatacatttattttacaggtcatcataagtgcctggatgaacggccagtggctcggttttagaaaatataagggaagcgccaagaacaaaagtccagaggctgtggatgttcaaatgctcatcggagtgaaggcgtagaacctatgtagtgcgggggtgagggtataatgagaagttagcatcatcgccagatcagcgccactgaataccgaaaagtttcaaggcgccagccacattaggcttctctgaggcttgctcgaggattatgcgagaatgccctttcacatccaacgcgagaagctggtactcaaatttgctcttatccaaaggtttcatcatgtgtacgatgaccacgccggagttgagaggaccctcgacctggaaatcacggttagtacactcatctgagattgaccggaaagggtatcatacatggaaatgcatgcgaaggtgctcacgacccaatcgatccttttcagctgatgatctagtcaattgtcagcatctcggctctctcgcattatgtacaaaccctagaacctacgcgagaggcttgttccgtgcccaccggctcgtggtctcctcgccatatgccttgatctctcttcggtcaccgagcaattttatacactcggggtcatctttaatgcgcgctaccgctgtttcaaattgcgccgtcttgctgtttggcgacaaaacctcgagatagaaaagtgtgaagactccgccctaaccagatcatagagtcagcaactattcgccaaagcctcgtgaatgaatgtagttcataccgtcagtactgctccagccaacacgataacgaagttgaaggattgctgtgttgcccgcgcaaccttctctcctcgactcaaatcgccccactgaactctcccatcgtcggacaagattgtaatgctttttttccttgaagaagtagtttgaggcccgctacctatgttgctctgcgtggcgtagagccgggcgatctgtgtctgtatgcggggagagggccggaggagaagatatgccggcgatagtccgggaagagtgcgcagctgaagagaattcattgtgaaggtcaaaaccgagcgtcctggaacaagttggagtatctgagtcgaataccggactcgaccgtcttccaaccccgaaaggttccaggttgctatcgatcttcataatcggcagcacgtgcttacaatacggtattacaatacgtcctatggcaatgaagttcccagccaaatgtgaggcgttgtatcgcgattacaccaggcacagggtcgacagagtccacgttcgccgttcccgacggacgctttgctctttgccttacctgctcacattctcgcccaaaccccctttttcttttctctttgactttcccattgatctcccctcggtacaatcatgagtgccacaaaggcgcagtctcaaaaaatctttgagaaggccaagttgaagcccgcgaacaaggtgcgcatacccccaccccgtactgtatgattgtggcactcgattctgatgtttttgcttttcaggtatgcttcgactgcggctctaagaacccgacatggtcttcggttccattcggtatctacttgtgtcttgattgttcggctcaccaccgtaatctcggtgtgcacatctcctttgtccgatcaacaaacctcgaccgtacgtactgccgcacaatttctacacatgccaagtattccggtggctcaacgctgacatttctatagagtggcaatgggagcaactacgggtgatgaaggtcggtggaaacgaatctgcgaccaagtatttccaatcgcacgggggttccgctgcgctggcgagcaaggacaccaaggtcaaatacacgtgcaatgcggctgtcaagtataaggaggaactcaaaaggcgcgctgcgctagatgcgcaacagtcagtggatctacacccggaactggcacgactacgtgctaactagtgttattgctatatttaggtaccccggcgaagtcatcatcacagatctccccgccggcaccccctcagatgactcgaacacccctgctggtgacggcgacgatgatttcttttcctcctgggacaagccctcgatcaagcgtccgagcaaccccccttcgcgcaccagtacgccccccgtcgtcagccggaacggatcccctttcctgaacgctggtgcaaacggaaacggagcccgctcgaaatctcccttgtctgcttcggaggaaaagagcgcttctcccgcgccggctgctatccggcacaccagcgttagtcggaagacctctacagctagctctgcaaagaagagtagtgtcctcggtgccaagaaggcacccaagctcggagctaagaaaattgccgccgcggatattattgatttcgacgaggcagagcgcaaggccaaggaagaggccgagcgtattgaaaagcttggctacgaccccgaggctgagcaggcggaagacgaggccaagaaggctgcaactgctgccgccgctgttccgatcgcctctcctgttccagtcagccctgctggcatgtccaatgaccgaaactccggtgatgtggggcgactaggcatgggtgtgagccgacttggctttggccaagtgtcgaagcccgttgcccccaagaagccaacatttggttctattggccctgctaagcccaatcccgctgatggtaaatttcctttccctcgttgattgtacgtcacatgaaagataagctgacactcgacacagaagcggaactcagccagaccaaaactcgatttggcactcagaagggtatctcgtccgatgaattcttcggacgggagcgattcgaccccgctgcccagtcggaggccaaggaacgtctccgccaattcgatagcgctacatccatttccagcaactcctacttcggccggcccgaggatgaggtcaattcgcttgacgatggctatggtgatatggaggttgctgctaaagacttcatccgccgctttggtatcacggctggagatgatcttgagaacctgtcgcatcttgtgggcgaaggtgcaactaagctacaaggtgagcaagtctctgtttgggcatggacccacgttttgctgactgaatatcgccaggtgctatccgcagctatttgaacaactaggctagctgcccatcaccggatattacgccttttatcactccaagtaccttagcaagcaacattgttccctatccccggttccgtcatcttcctacgcgacgtatattgtgtctcccctgtccatctcgccctttgacaatatttctttacttggaaaaacattgcgatcagcagtcggccaaaaacttgggtttcatatcattctggtttgcgatctggcgattattttgtcttctcccttgctttttcgcattcctacacagcaacatggaatgatcgaagggaccctttattttattttgctcatttcgttgatatggtttaggataaatggtttaggataatcgagaaattcatggtttgatattattgatagacaagaatttttgacaaaaagtcccgcaccgcccataactccatgatgaatgaagataacacagtaagtagtacatcacagtacaagtcacatccaagtgttgaatacaaaaaaggccctatatataaaaaagccgggcaaggctatacagtagcaagtacgacctcaatcaacgcgataaatcgcatcggcaaccttcgccacctgccacatctcatggacatcatgaacacgaacaatgtccgcgccaccagccacgctagcagagacagtagcagcggtaccccaaacgcgctcccgcggcgtcttgaccccagtaagatggccaataaatctcttccgactaggccccatcaaccaagggaagcactcgagccccggcatcgcccgcagcctaggcaggtcccgcaatatctccagatcatgctcctgaatcttcgcaaagccaagacccggatcgaggatgatgcgccagcgccggatccccgcgtcttcggcagccgcaatgcgcgcgcccagctcagcagctacttccgggataacgccggtcgggtactcgtgtagggtcgtcatcgtttgcggcgtaccgcgcatgtgcatcaggatcacggacttaccgatccgcgctactgttggtagcatttctgggtcgaggaggccggctgaaatgtcgttgatgatgtctgcgccggcggcgcaggcggcttctgctacgctggcgcggtaggtgtcgatgctgatggcgatgttggcggcttctggaatggcggttcggatgtgcttgattgctggcactacgcgggcgatctcttcggcggcgccgactggttttgagcctgggcgggtgctctcaccgccgatgtcgattattgttgcgccggaggcgatgaagttgcgtactgtttctgttatgtagtttaggtcggttggggagtgcttgccgccgtcggagaaggagtctggcgttagattgaggattgccatgacgtgggtgctgcgcttgggatccgttgcgcgcaaggatgggaatagtggtgagattggggttgtcgacattggtgttggatctggcggcgagagagccttcagatgggtgctgtatgtttgcgtgtcctttcctggtagtggagggtattcatttgggattaatctaaattcagatggttagttttgcttattgtgtcggtatagcatatataaagccattgggagcgtactggctaagaggtcgcaatacaaagtctcgctcaagcatcagattgtgtgggatgttgagacgctcatgacagacgatctcctcatcatatagtaggatatccagatcaatagagcgtggacctttgtcgatgagcttctttctgcccatcgcaatctcaatagattgaatagtgtccaaaagatccaaaggtgcaagggttgtttccacctgatagaaattaacaatgggctaccagtttggacattactttcgctaacatacctcgcatacaccattgatgaaggtatcttgatcaagcacatacatcggtgcggtttcgaacaatgaacttgtccttttcactttgataccaactcggtccatttcaagacaagcctgctcaatcatttctactcggtctccgacattgcttcctagggcaataaaagcccggtggatgtctggactgggaaacttcaaattcatcctggagtcaactgcttgcgcagtggataaattcctcacaggcggggtcaaatgcaacgacgttattgaacgtcgtgatagaccatttctagtgagaattcccgatgccaattgggctgtatataccgattgagattgagaagttgaccctattgaatattagtgttgcaataaagtagagacatggcaaataaaaaaaatttgcggggacaggcatatttccccattgggacgatacgccgataagcgtgcgaggggcttttaagaagtagctagccacatacccaggctctgcggtgagggttttctgttactataagatgtcgtcagattcgccacagttaattggttatttggggctttaccctgtatgcaacggtctatgaccactcctggccggacctgcagccaatggcgaaagtcttagcgacctcccaatttgccgtgtatgaggaagaagagatgccaatggaggggctctctggattaccctggcattcatgctgatttgaaaaggaacgtagcaatacaaataatgtaggcaagggctttgagtcaattctggtaagtttcacgtggttcgccttcttcttggcgttgacgccgtgacgctttgacgtctggatgccttggtgccttaatacctatacaacatttctgattctccgaagtagatagctagctaggtggctttcgtggcatatataatgcgaattacgctcattcctcaccgtgaacatcacccatgaatatcaattgatcgaaatatctagtttaagtcctgcttgatgatgtccgccgccttctcagcaaccgcatacacagtcgcctggatattacctctcggctccaaggggaaaatactagcatcgacaacgcggatattagccgagccgtacactttcaggtgggaatccacaacaccgccatcttcttgtggcatcatcgcacagctaccgctgacatggaacatagacaagacgagctctgtgcacagctcctttgctttctcaagatccgtcagaggctccggtgtgtggaggcgttcgccacctttcttcagtagcgatgtcattggctccgtctcagcaatcttatccatccacatactatgcctagcatgcaactccagatcaaccgggtgacggagagttccatgatcaatgagaggagcagccttggggtcagaagattggatatggacggaccctcgtgatagagggtagctaagcagagaaacaagagtaataaagaaacccgggtgcccgagaccgaaaagacgtttgggggattctccttcccggggcaaaagctggaatggcgctagaataaattgagcattaggttcgtcgggattctggagtagggtgcgtaatgcttcatattgcttcttgtgtgtccgcgagatgtcgggactgtctatcgaagcttgcagcttctgtagcaattgagtccgctcgtcttcgggggtatctacaagtggcatgaatgcagagaccaggggcaccatgccaaggggtccggagccatccttctgataagcggccatggcagcacccgcaacggcagggtcccgagccatgtcgcctgacggcataccgtctgcgacttcatatccgaacgagacaataccgtggtcttgcatgttctcgccaacaccggggttgttgattattgtcgggatcccgtaggactggaggaggctttcatctccaacaccagatagctcgagaatttgagaggattgggttgttccggcagcaagaatgacttctttcgcgactgacacggtgtacacgtttgagtctttgctaaacaagacaccagtagcaatggcatcaccaccgttgcttcccttctctatgacaatcttttcaacccaggctccagttacaacgcggagattcgaccgagcttgcacctccggccccagatatgcagctgcagaatgacttctggtgtgtgtggcgggatcaatagaaccggggttcacgaagggaccggtaccggcgccattgatcgggtcatcggcctgcgggtacccaagatttttgaaggtgtccatccatgccgcatggtaaggcatgtactgatctccaaatgagacttgaacaggacccgtgctaccttgatcctgctggtcatatttcatccccttgaagaactcacggttgtcatctgatgggggtgctgctgtatgaaacttgcgaatatatggggctaggccatcccatccccagccggggttgcccaatgtttcccaggcattcaacccggaacgagagggatagatgaccattcccatattgattgctgaggagcctcctaaagtgcgacctttgctgcctaagagcttacggccattgagttgttcctatgttacatggataaggctaatggcaaactttatggggattgagtgaataatagtgtacctggggacacgatcgaaaattccaatcaaagtcctcgtcttcaagtgtcgccggccctaagccgggaatgatgattcgagggtcattgagacggtttgttccggcttccaggacgaggacgcggatattgggattttcagtgagtcgattggcgaccacgaggccagcagtacctcctccaataatcacaaagtcataagatgcgttctcaagacctgccgaggactcggtgtcgaaagttgccatggtcagttatgtaatgtaagtgaagcaagatctgaatgagagaaatacatctagaaatgagatgtatttggggattgctcttaggaggggtagacggattggggggctctcaattgagtggcgtccaactgttttaccttcattggaaaaaaatgtatttcgtagtacgtacgtacatgtgacgctgatagctcaggggaagtaatgtgatgtattgtactatggacagcagctggttaaggtagctactacatggtcacgtacgcccacgtaagagcaacagtacaatacaatcaacgaagcccctgaatctcttgtcgaaatgcgccccaagctaacagaatccaaccaatctaatcggagacttatgttgtatcgtagcaacgggatgggccgcgctatgccgaacgggagcagtgcagaccgagctagagctagcctgcatgtgaaacagaggcattgtattgcaattgacgggatatatttgccaagcctcggtaagaagacaacatccctgtcctttcgggatgaaacgtgcggggatgaaaggctaggcctaggtagtgcatattttgctgaattttctccaccggccttgtccaaaatatcaaatctcggattggtatgaatgtgatatttgacacatatgtacggagtgtacctcacccatttcgatgaggtttttcttccccaacttccggccaaggctgggctcgggcgggggccggtgcgggctcgtctccactttcctcccgaacgggattggttccaccgagccgatacgctagccgaaaataggttagcgtgtgtattaggtccgggcataatttacagcgtatcactactaagccacaataaaaacggcctagagagggtcatctgttctattccttgtctgggggtacccagcagccctgtgggttagcgtaggttcgcgtatattgattaggaaagtggatcttgatattaaatatttcttactcctcattttctaaatcttctaaatcgccatgcgacgttgacggtccgagtaacggtatcaaactgaaaaggaaagccacaatgggaaactatggactaaaagcggaggatggcagggaggtcgtgattgtgatgctggtctttggggtgatttccctgagttccacgattcttcggatcgtgtcccggagaatgagaagcatcagcttaggcttggatgattatttcatgattagtgcgacggtacgctcatcaaacagcctttctagcgtggcgtgagactgatgaagcctgcagattttggtaatggcgtgtactgtggttgtaatattgagtatgaaacccgtcggggaatggaacaagagacagcgctaacgggtatctcacgcagtggtgacaaagggaggagttgggctgcatgcaaacatgagagatgtcgcctttccagacatagaattcaatctcaaggtatgtgaatcacaacccttccaaccggtggatgaagctcaccaccgcgcggaaaagatgattatcgtctgccagattctctacgcaattggcctcgcgcttgtcaaaacatcaatgatgattctctatcacaagctctttggcaccaaagccagcatgcggattgccatttatgtcaccggtactatcgtgtgggcgtggggactgagtatcatcctcgaatcctttcttatttgtcaccccgtcgcctttaattggaacccgacgctacctaaaggcggatgtggaaatcgtaatgcagcctttgtggtagccggagtactcaacatggtgaccgatctcatggtcatgttacttccaatcccatatatttggaagctccagctacccgtgggccggaagattggtttatcggtagcattttccataggactgttgtaagtggatccgcgactgtgctctgatcttgattgcacgttcaatggctaaccttttgaaccacagtgtcagcgcaatcagtatggtccgcgttgacagtctcatgcgcatcgatttcaacgatctcacatatacccttcccattccgttaatgtggagtatcatcgaacagcaactcgccctcgtcgcggccaacctgcctcttctccgtagcgtgttctccgccgtgcttcctggtagttggctgggctcatcagctcgcaggactgggacaccatcgggggagcccagtgcgaagaagcgctcggcgcaggaatattctctcacgcgcatggatgctggtactaatcgaagtgaggtcacggcagacagccacaaacatgcgaatcacaattcccagacgaggtggagtgacgatgatgagcaatcggatacagagttggctgcgaatgcgatgccacctgatgggatccagatatggaaggcttttcgagttgactcgaccagagagaatgttatttgatgataatgataccaatgacatgtccctcgccacgataaacacagtctaatcataatggccacgaatcatgacggttttggggctatcacaataatgccttttttggctcgaaacatgagccctttaattatgagggagatatccatgaatactctaccatataaatgaaatgtttttcagattctggtgtcctttcagcccagggcttgtctcgtgactaagcatgcacctaggcgcgtgcatagccgcccttataatcctgacacgacaatataccagaaaaaggagctggtaacagggatcgttgacattgagaaaaagcttatgaaaataccatttgcttctgttggcagtgtctatttcaaaacggatctccctccccattcgcagggccaactatatcagccaggcacatccgacgaggaccgagactctgagacctactgtatcggacccaatgccgattacatgttttggtatggaaaacgcgcaaattttgacttggataggggaccatgtatattttctgctggagcaacatgatacataacgccaagctgaatatctcatagggagtgacctacggcaatatcttcttgcaattgccaacaaagaaatcaagtggaccgagcaattcgggaagccgcttgaagcggctttccacataacaccgtttttccgggagtcaactcccaccgagattacttggtgctccttaggaagtacatcgcaatgaaagatccccgagatattttgaatcgacctacccttcgccatcctggtttgtatacaacccttcaatcatcagactgataaaagctaagtacaacaatagacctcactcccagcaatgtctctgtgtgccccgacacattcaaggtcacatgcgtcatcgactggcagcatacagttattatcccattactccttgctgccggctatccgaggctatttgagaacccttcccccgagccccaataggcttagtcccgccaaaatatccagacggctatgatatcatgagtcctaatgataaagctcaagtcgacgagctcatccggcgggaatctctcttctatttataccgagttttcaatggaggactaaacaaagtgcatctcagagctctacagaatcctttgattctatcacgtcagcatctagtggattttgtgggccggcaatggtcgggcaatctcatgaccttgcgaggagctttaatgcgcatgcgtgacatatggccctatgtcccggggaatgacgacaactttgaatgtcctactacattttcagagcaggaattgaagagcagaccgagagaaagtcaacgtgggacaacttgaacatgcttgttgatcattggcgtgatgaactaggggagtctcagaggaaggctgggtccggaatgaccagtacgactatgctaccaaacggaaccagtccctcaaagcaaaattttcagaagatggcagtgcagacgagcttgagaacatcaagtgaggctggccttttcaggaccacgagttctttcaatcatcgtcgcataatgcttttttcaggctttgtaggcgcctggcggtcaagataaatgctatatatggcaaaacattcctccgaaaaaaaaagctgaagtccatatttctgcatggcgtagccatgtggcacctggcgctaatctgctagacctaattggtggctagtatatctatcatcgcatgcaggatacagggctacatcaaaatctatcctcttcaccaatcggcctcatgatcgatccatcgttcgttaccgagacgcctgtagatcttcttcaatatggcgtgcggtgggaccatgaggtgttgtcacaaaagaggagggaacagagtaccacaaagaccagctgcagccgaatgccggcaaaatctatcctcaatcaagcttggaagcaatgacgtgacaagaacggcgggactcgtcaactaaagcattacttcgtgcgagaccaagaagccctccgagcccgcttaattgcgcgattaatcctgtttgaaaagcccgccgaatcataatacaacctacagcttttctcgagaaagaagtaagcgatttacgcgccgacgagaagtagaagcgaagcggacttggtcgactaagcaggtaacccacgaacacggcaccacgaggatgtggaatatgtagggctctagggcatagaagtgggacatgtttagatgaattaatctaatttgattaattaattaattgtactttagttgagataaacgcatttaaatccaatcagtcgggttgggtgtgcaggaaatacgttgactagctaagatcgagataaaaagggagcttaaacggtccaagacaactacaacatagatacgcatttcaacagccgacttatcttcagttagttttgtgttgtaaaacatccgattggcgtttcctcatcgtctcctcagttggcgcaatagctgccagagctgctcttcagcacgcaatcacagtctccggtgacatcttgatcttggcctatcgccaactagatttttcggccgatcaccgaggctatgtaattagttggagtctgctatataagtttctccaaatcctgtttgttgggtatacacaaatatgacagtcccccaacaacggcggaaatggtggaaggtgcaatggtttgcagaccaggacactccagaggagagacggctcattaccaaactcgacttgctgattgtcccttatgcgttcctcgcatactggactaaatatattgaccaggcaaacataagtaagaaatcctccgacgggatatcaagtatgttaggtcaattctgacaacaaccagataatgcctacgtctccggcctcaaagatgacctaggtctacacggaaatgagcttgtacagctgcaaacaatgtatactattggagcagtggtcggacaactgcccttcattttcctatttaccaagctcccaatgtcttggatgattccgtgtatggatgttatgtggggaatcttcacgttgttgcagtaccgggcgaactcttatgcagagatggcagcctatcgctttttcgtgggctggtttgaagtaagtatagagaggtctgattgactgaatgagagtactgacattagccaggcgggtttcttcccggcaatgcattacacttttggtaggcataacctaatctccttgtcagaagatccatcactaattgacaataggttcatggtatcgcggcgatgaaatcgcccgccgcggaggattcttttacgtcggcctgaccttcggcacattaacagcaagtctgattcaagcgggcgcctcaactcgactggacggcgtcaatggactcgccgggtggcgatggatgtacattatctgcgcaatcatcaccctcccaatcgcaattctcggctacttcgtcctccccggatcacccgacaggccgaacaaattggtgttgaaagaaaaagatgtacagatagccaaagcccgactggcacgagtggcgcacgagacaaaagaaagcagtctctcttggcggtcggtactaagggtcgccagcaactggaagttctgggctctacttttactggatgtgcttttctggaatgggtctataaataccactgccggtggataccagctgtggctcaagagcctggaccgataccctaccggccgcttgaatgagctagctgctatttcccctggcttgggtatcttttacacgctcttcatttgcttctcgtcggatctattctttggacctgcttgggcgattacagtgtcccatatatggaacattatcggactgatcattcttgttgtctgggacgtctctgagtcgacgctatggttcgcgttcctgactacttactctgctgtcgccatgtcgagcgttctttacggttgggttaacagtcagctacgagcttctccggttgaacgcgccctaactctcatcatcatcaataccgtctcccagtcaaccacagcatggactcctcttttagttttcaagaccgttgaggcgccgcgattcaccaagggatactcatttgtcctcggaaatgccatctgcttgattttgctcgcccatgtgatccaattctttatttcacgagaagagtaagtcatccccctaaccaccaagtcaaggatctctaataaatttgttacaggaagcttaaatcgagtcgggggagcgtatccggttcagaaagcgcagatgtttcgagctatctcgaggccaatgttcaaagcgagggtgtacaggggaaagttgatacacagtcataatgcagcacttgatagcattcataaatagactttaggtaaacattacgttggaactatacaacttgattagatcactgtcatgaaaactccctgccattggcgtaaaaccagacatgattttctgtataataacagtacgggataaacacaagtcggctgtaaaacgcatgaaacaagatattaaacgacatcataagaaacccaccgcagaattctcattctcataaaaattgggttgatttacgtctcgtttgcagaagtcgatgttgtgctttatgcgtcctaattaacatacgcaactaaacatagtggtgtgccactggtgtcattcaaaagctgataaatgccaagagatatttaacccacagttctacctgaggcaccaattatatgcaaaccttgcaaacttttcaggggactttttttcaaggtcacgtgtaccccatctgtaatttctaaagccattgatccaactccgagctacaccttatctcgtgtcaccgctgggtttattgccattcctaaatcctcgacgtttacgactctcacgcctttcgcatctgatctcgtcccggtgatccgccttttcttcccaactttccgcccgtccgcctcattcacacatcatggatcacacacgcgatccctgtccctgggttgccctgagcgatttcggaggtgccttcgccatgggtgccatcggtggtgctgtctggcacggtgttaagggattccgcaatagtccgtacggcgagcgccggataggtgcgctctcagcaatcaaagcgcgcgctcccgtcctcggtggtaacttcggctgctggggaggtctcttcagtatttacgactgttcaattaagggtatccgcaagaaggaagatccctataatgcaatcattgctggtttctttaccggtggctccctcgccatccgtggtggtttcaaggccgcccgaaactccgctattatgtgtgccgtcttcctcgctgtcatcgagggtgtcggtattggtttccagcgcatgatggccgataacacgaagctcgaggtatgtggaatcttatcgccttcgattgtgcaattagacgtgtctgctaaccatgaaaattattagcttcctcccatgcctccgtcggagcagaaggccctcgcttgaataccctcctctcggtccatatcttccttcgatcgtcgtcaaaatatcctcctttctacccctgtcttcataaacatcaagtctctcttctcaggcgttcggtcgatgtcattattcctatacaacatagcacagaggctcccgtttggttcctactttccccctcgcttttaatgccgctttctacggcttgtgtcgaagcattgtacattaaacatggcgaattcattctcatggatggttttaagaccggtgcatgtcttttcatggcagcgtgcttaaaccacaagattcataacatttgttttcttcttcctttagataatttgtgaaatagacgaccaaagccgcgtatcgtacgggatcctgctaataactcgtggactgaaagtgtcacagatagcaattcagagtctacatcgggcagctttcaatcgctacgatgtaaatcggatgccgactgtatagcctatgggcctttctcgacgatccgtctgcctttacccttaggaaaccctcacataaggtcacacttgcccgagcaaactaaggaccttcattgagactattactgtggacatacaagatatttcatagtatgtatatctttttcttttttttttttttttgtatatatacacgccagcggccttccagagcttgccccagaccccactatccgcaccccaacaagacgcgatggccacttcgcacctttctactacgtatctaaaatccctaacacgccaacattctgccttacccgcgatgacaacaccagtcgccctaacacaaccaatccccggggaccgagatgactatatctatgtctacttcgggtgtaacattatactacgggacgcaactcgttatttcgataggattgcatatataggtccagggcgctgggtcggatgccaatatgcggtagacggcggatttcttataaacacataacatgccgaatgtcataataataaaagatatacggagtcgccggatgtacggcaaggttaacagaagcaaagaatgaaaaggaaatagtaaattaggattcaatagttataccataagaagtagtactctcatactttcgtcccgtctcattggtctaacaccctattcgctccactatccgcacctaagtacatcctccatggagccagtcagctttgcagtcggaattaagggttagtaggtctttctagtacttgcttgaggccgttgaaatgttcgacccgtggagtgactacgattcccaatttcgttctctgttagtcatctaaagcccaaaatcttcgactcacatagcgggtttagctgcatggaagatggcaaactctcatatacaaacgacctataggagatattctccgaaaggaaaatcgaaagcacttggagtaggtttggggtcatccctagttattggactttccaactggatgtgctaaggtcctccaggatccaaatcaatcatatgtgcgggagtcattgaccatatttctccaattcggtgcatattccttttcagatctttgccactgcttttgagccgagccggatgattacacaggagaatcagccagacgttggaggttcaagacgaggcttaccaagaagccagaggtatgatgtagattctgttataccgtaccttgaattttgtgtgtgttcctgtgatcaagtgctcttgaagaggcaacgaaaagtcaatttggtttttctttttccttttcttctttttttttcttcttttcttcttcttttccccttctaacgcagccagagaatgtgtattcctggttttggtagatttagccacaggtacatgctgccaaagagagggaaaccacaggcacattctgtgaggggtagaaccaggaaaggcaggagaggcgagagttaaacatatgatccgatatatccgagttgaccgaaggaggcgaagtactcaaccgcttgatactattgaacatgactcagcaagaatcacgcgctggctaataatttgtcgaatgacaagtcccacagaatatcgtggcaaaaagtgtggctgagttggtggattataggaacccacttggagccttgaatggatataatataggatttttggtttaaagtccgcgtgttgaactacaacatgtaagagtatcttaccgagaagttatttgaggtcttctatagtagatagcatccagaagacatattatgtataatgaacatttgaataatcggctgctttcggtaattttaccgtgcctaggaaatattgccacaggaagctgacgagaatgtaagtctatcaaactgccgggcagctgcgaaccacggtggacaatctcagaagccatgcgaactgatgtcagatccgttttttccctctctctggtgtgtttcggaagggcatcaaccttggaaagtgcaaggtggtcgaatttcgaaccaaacccgttgaatgcttggatcaatctgagtttaaagaatcgaaagctgacaaagtgttcgagacgcatgtggaagcctcagccgcatgctatgattggctaccggttctcggaagccaaccttattgatcgaaccccacatctatagaattgtagtctatccacactctatccacactcccaccttttggttcctcttggaaagttctcctcatccggagcgactccaccaagcaagcatagaaaagatggccctctgcagacatgatccccttttctttctttcttcaaacacattctttgatccttcaagtcactctcttcttgaagtcattcattctttcgaggttgatcctccattactgtcactttagtatctctgtaaatcaggtgaacttttgtcccacttccactccctcaatttacaatcttccatcatgactttcaacgtcttccttaccggccttctcgctgccaccgctgctgccgtccctctttccgctcgttccggagaatccggtgccgttcagacccgtgattctggcggcggcggccttcagatcgtgaacaacatgggcaaagatctctacctatggaccacctcgtccgatgctggctccatgcagaccatcagctctggaggtgaccacagcgaggactggaccacgaactccaacggcggcggtatctccatcaagttgtccaccagcgagaccgaggatagcgtccttcagttcgaatacacccagaatggcgataccctcttctgggacatgtcctccatcgatctcgacgcgagctccgactttgtcaaggcgggcttcaccgttgtgcccagtgactcgagctgcaagacggtttcttgtgccgctggcgatgcggactgcaaggatgcttatcagctccccgacgacgtgaacacctactcgtgctctctgagcgccgatttcactcttactctgggataaattttttttcttttcttaaaaccggcagggccgatggaattttggggtttttttggattttttttttagattgcagaacataacttcctccttgggttgttgatagactcttggatatgtatttacttctggagtcgatgtttactatttagcagtgagcttatcaagtatcactagcacaatataagaatgtgttgaaaaagatctcatgtccaactatcaagatgtaagtgtaacgctatgttcgtataattggttttgcttcaagcatatactagggacttgctattctcctgtccaggagagatgtcttctccctcctctctccagccgcagacaggtcacagatcatcccactttcgatccaccatcagtcatcgacagacatagacaaacatggcctattattctcttaagcaatcattgaggtcaatttcaccatgacatattacccctttatcccagtcaaccaaggggtaaagtgcccctcatggtggaattgactccagtgattgcccaagaaaagaaaaagaggatatggctaaagtccgtcgacaaatgatggcggatcaaaagcggaggagcatcatatgcttatgtacctgtctgcagaggggagaaggggagaagatgccaacacacgtatgtttcatattgggctggcccagttcttggcagacacgtgaaggtctccgcctcaggtgtcaacgaaccccgcaacgtaacgtggtgactaatctcggccaagtcgtgtaggccgaggctcatttcgagtctgtgaccaccgaggttgctttgctttataggttggtcgcaccccgtctgaaccttctcttccccaggttttcttcttccattgcctgcaccccacatatcttcataatggcttctcctcgtaagtgttctatatcccctatgtttactctgcaccttatttccatgtgatcctctgcatggctccatgtgggcccatactttcaacagtgttaaccgggaccgttgaacagaacaaatccgtaccccgatcactgatctgctcaagatcaaccaccccatcctgctggcaggcatgaacgtggctgcggggcccaagctggccgccgctgtcaccaacgccggtggtctgggtgtgatcggcggtgttggctactcccccgagatgctacgcgaacaaatcgccgaactcaagagctaccttaacgacaagaacgctcccttcggtgtcgacctcctccttccccaggttggcggtagtgcccgcaagaccaagtaagaaccttcgctgcggtacttttccgttgttgacacgtgctaatcgcgttttgtttcggcaaatagctacgactacaccaagggcaagctcggtgagctcgttgatattattatccaggagaaggctagccttttcgtctccgccgtcggcgtcccccccaaggctgttgtcgacaagctccacagtgccggcatcctctgcatgaacatgatcggccaccccaagcacgtccagaaggccctggatgttggtattgatattatctgcgcacagggtggtgagggcggtggtcacaccggtgatgtccctaccaccatcctcatccccaccgttgccaagttggtcgagggcaagaagagccctctgaccggccagcccgtgcaagtcatcgcggccggtggtctgttcaacggtaactcggttgctgctgctctgatgctgggtgcctccgctgtctggatcggtacccgcttcatcctggctgatgaggctggcgcccccgccgctcaccaggaggccgtccgcacttccaacttcgaggacaacatccgtaccattatcttcactgtatgtatcaccagcgatgttattttcaaggcgtccatgttgctaacaaccgatatagggacgtcccctccgtgttcgcaagaacccttacatcgtcaactgggaggagaaccgtcacgatgagatcaaggagctcacctccaagggtatcatccctgtcgagcacgatatggagaacttgcccgatgatgtcgatgacgagactttggacaatgcccgtccttggctgatgggcaaggttgccgccgttgtcaacgagaagaagcctgccaaggctatcgttgacgagctcgtcagcgatgccgctgtcctgctccagaagggcaacaagatggttgctaagctgtaaataattattccctatattctcgatctctatagtcatgttcagcgttggataataaaacttgaccggtgatattcccggccgacctttggaacttacctgaattttgctcgatgtacttggacgtcacccgatgtctaatgtaggttagcgttgtatgatcccctctccaggccgctatggaattatccctgctctttcccaaaccttccttgatccaaaaaaagctcttaagcgcctgggtggggtatcaactatcaatcaccctagttactccgtattccacgtggaaatcacatccataatcgttatgtaccggcattagttagtcaattatgatataaatagattgtctatccttatatttctcattttgcttcccgtgtcccgtgtctacatgatcggtgcttttgctcgctttccttgtgttgagaccactccaagcttggtatatctcattccgtctgtaatattcattaaatctcaactcggatcgtcctctcgctgcaaaatactcctagaaactgagtatccgttccacaatctagacaaacagccgaggtccgcacgctccattgtgttctcgatcggcacccgagcgcattagacactactgcacctataggcagggttaatccgtaagagtaaatacacacatatatggagctgcaacgcaaggtacacagaaatcccagttggttcaatccgtgtgcaggtggacctagtgggtctgacagggtgtttgtagccgtattaggcttagctcctgagactaggtatgggatgctccgagccaaaagaatctcggatttcttggtgtatcatgtatggatgttacaattacctggctgatcagctagaagtcggctcggtcaggtggaacagtttgataatcggaggtctaacggccgagagattagccaagcataggaaacatttagcaattacatgcgacataccgagtacataagaccagcacggagctcattcagagcagtggatacgttcctgggaattggtctgtgagtccaatggaaagtgaagtggagatttcaatggctaaatataaaagtcagtgcagtcggtaccattgagcaaagggaggtccgtggtatgacgtcctgggaggcgttcgctagatcgtacggaaagaacatccgtgatttgagtctttaaccttttcaatcaccgtgctttatggtcccacatgatgtgatgttttctgtacgtgttgcagctgtgccgtcttaggccctacaacggtggctgaatacggagagtttttggccaatgaggcatggatataccagtgtttttgctggatgcttctaggtcacttgaattgggattgaggcgtcgaattcgaaagctgcttgccaatcttcggtgactcgaacgcaccatagaaatgttttccggcgtttgacgcggtgtcggccggaaagccacagagactaacaatatctagattttcatgttccatcgttaatcattctctgtgtatgcgcattagtatggtctatcaatccatggatgtctggtaagcgggtcgggccggtcccatggtgaaccatcaaagacttagacagccagctgtaaattgtattcatgttgaagttggagataattccatagacaccaattgatcgaaatgatttctcaccgttggctgatgtgggccgactcggtatgggccatcggccgttcttacccgagtacacaccgattgggacttggcgaggagataatgaaaagggacagtcttggaagtcagtttcttgtgtaacacccccaattgaacggaacacagtcaaatatcgtgagcactagagcggaaagggaaaggccgtgaagtgtatatatagccttgtggagggatcatcggcgccagggaccttgaccagaactatatacggagcaactcactatctcgaagaatcgactccgtccttcgctttcagacatccgtagcgagaggttgggtgtcgataccctcgggccctgttcaactctaaataaagcactgcaagcgccgtggcggggaatgaattgaagtgaccagggggccgaggaccaatgaaccatgaattctcccacgcgatagaccggattcaaatcccaagggaatatccccgcactgtccagacgcggccggtgttcaattatagagtcgaatgaaagtcaaagcacgtcgggagtcaaagcccatggactattggccgaagtgagaaggtaggttggctgtcactgatcacaatacgatgccatgtcggaaatccgcccactcataggctcggcagtacgaaaacgcttgtgtgggctcctattgaccgaggcgtgcataattgctgcagcaaagcgggttatttttggcccatcacctcgcttttttctgtcgaagtagcctttccaggactcgcatcttttcccctgcccctccgtgcagcgctctctgcaggttctctaagattcgggcttttctttgcttttttgggattttcgatttttctctgcaattcgtcttttcttttcttttttctttttccgcttcattttttcccccttatcccgctaaccctccaattcttctgggatccaagtcgctgggacgccccctcatctccactcaaccccgtcggaggttaagccaattagtttcgcaatcgcatctgatagcactctacagtgattatctataaatacattgcaactgatatccagcctttgcacgtcaatctcgggatatcacattacctcacgggattattcgcctggagccaatcctctccccgcagctcgtcccatcgcactgttcttggcccctctatcacctccaaggtttttttcgtcacaccgactgagcccttggccattggcgcgattatattacttgcgctttcccggctttgcgctggaaggtgagcccacaaagtggcggaacccgagactattatcgtgccctagttggatggaaagtacttgcaaagtctttcaatctatatcatctaggcacactttgcagattccgggacaatgtcgctcaagcaagtatgtatatcggtgatctcggaacataaccatgctgatactgtgatcaataaggaaatcgaaacatgggtgcaggcccttgaggcctatgacaatcaggaatttgaagagtccctgcgatgcttctatatgatttccgatacatcaaagatcttgtttaactgtggagtgatctacgcaacgctaggcgagcatcataaagcagtaagtgatcccatgagaggttttcccgacagtaactgatttggtgcaggtagaatgctatcaacgtgctgtcggcctagaccggtatctggcaatcgcttacttccagcaaggtgtatctaatttcttgctcggagacttcgaagaagcgttggccaactttaatgacactttgttgtatctgcgaggaaatacttccatcgactatgaacagttaggtcttctattccgcctgttctcatgcgaagtcctgttcaatcggggtctatgctatatctatctccgccaaatgaacccaggcatccaggacctggagtatgcagccaaggaaaaggttactccagaccacgatgtgattgacgatgccattcgcgagaatgcagatgtatgttactctactaaattgctggatacaagctaattcaaatacagggctataccgtcttctcaattccagtgggagtcctctaccgtcccaacgcagccaaagtcaagaatctcaagacaaaagactacctaggcaaggctcgactagttgcggcgtcggaccgcaaccaatcatcagatcaccaatggaatccaatagtcattaaagaagccctccaaagccgcgaaaaagtccccttcgccacatccaacctggtacgccacaatctcagcagccgtactcgtcaacaatccgaaccacccctaagccgcaacgtattccccccaacaccgccaccagacgaccgatcagccagcacagcatcgggggtatccggacaccaccgatcatcatcactgcgaaatgtccgtccaccacgtctggacctagaccgcacaggtgccagcctagaccgccgacccaactcacaagaacaggcctccaccgagagaccacggataggaacgacgcgcacagcctccgagccgcgcgggccctcctcccgccaaaacgtgcgcggttacccacaggaaagccgaggcagcatggcccgcgagcaagccggccaccgcagaaacctcagcgacacaaacccttccttcccaccggaatccgagtacggccccggcgacccacacgacccgtactcaagccagcgcaacctagcccacgcaggctggggccgcgggtcccgccaccaaccaccgcaatacatcgacgaagaggaagaatacggcagcgacacatgcgacgcaacaaccctccacgacggcggcttcgagctcgtcggtgcgacccctggtccaagccagcaacgccgcacccgctctccggcgcgatactcccgccatgcgaacccgcgtaggcccgagattcagaaattcaggacgaaagtccacgccccagatgatactaggtatatcatgatcgggccggagatcgagttcggggaattcgaaaagcgcgtgcgggagaagttcggcttcaggtgtcctttgaagatgaaggtgcaggatgacggggacatgattaccatggtggaccaggaagatttggatttgctagttagttcggcgaaggaggttgctcggcgggaggggagtgagatggggaagatcgaggtgagtctatctgcactttatgaatctttgaaacatgcatatcctgactggtttcatcgtttagatatgggtcgaagagcgctcaatgatttgatgcatgattggaatttcttctctgttgatattagcatcgtgattttgtctataccctttttttacgtatttagcatgaaaatacgaccaatgcatgagagatagtgatgtaattctctttcaatcgagctcgaacttaaggaaattcgttgacggaaacataagattggagatgtcattggcatttgccctggtggcaacggaaaaacttgattcttggactggcacttttaaaacaacatggtccgcttcgcagtacaggtttcgagcgaatgtcttcgttgcttccgcatgtcttgctcgttttccaacagtctctcctgcacatagcggcttccgctggggtcgtgcttcactcgctcgtcgttgaggatgtttgtgagcgttgctttgacttggcattggtagtcgcggatttgggcattggtggcatcggtggcatcggtgatattgccaaagatgatcgacacctgggagtctttttcgcgaagtatggagtctggggtaattgacctcgtgatggcgggggttgggtttagggtagacagcttggatgctgctaggttgttgtttggaggtggcgccattttgcaggttcatatgatagattggtattgatgaattgatgaatagatggaatttttggaactggtattagaaaaggagatgaagttgcttttaaaaattaatacaggcaagcccccaaactgtgtcaaaggtgacctgacgtctggcggcatatccgaaacctgcctgattgccataaaacgatgtgtttgaacatacgggtatgacatggcgggttccacgaatcagaggctagtgtatgcttggcctttgtgaagatcgtatgaccaagtagtcctagcgtgcagcgttgtcgccactggtggacgtgccgatgacaactacaatacgcaagatgctatatcagattttagttttgtgcttataattccctatcctggtcattcttatgatatactattgactttcctcaatgatctagaatcaaccggtcaagtatagtgatgtgcgttgtgtgcgtttatggagttcaggcgcgtaaggaactactccgtaggcgataatggattcattgctaaggcgctagatcggataccgaaatcacccgtgtctctcaatctcctattcagcatcggtctttgtctgtccagtctctttctcctcggtttcaaactcggctgtacctccaatccaacagccactggcattgccacccccaagcctgaacctcaaattaatctcacggtaacggtcgttgtcgcaaggctccctgatctgaagtggctcaacaggtctgtcgacaaagccatttatcaaaagcgcaaaagccaaagcagtcgtggtgtcctcccaattcgcatcgggttcaggaacctgtctcacttcgtactcctgccgtatttcgtcgacgatggcatacagacacaatccagggctctgaatcctttcaagaagcttcttgacgagatcatcgtccagcttcaagtcacgcaatctcctaaccgatctgatcggaatcagtgtcgttgagattatgtccgtgtcagcatcgtcgaccgtgccagcattgtggaccattccaggtgcaatgtcagatctcgaaatcttcaaatcggacagaatgacatccatgttttcggtattcacagtgttcatgtcacatgccaggttgaagaactcaacccagatgttctccttggcgttgtctttgtcggtggtcttcgtgatctttgcttccacacagtcgctcttggtcaagatgcggaggtcgccccgcggcatcatcccaagcttcgagagtagccacacagttccgatcattacatgagcacacttctctagttcatggtctgggtgccagacgcggatctcatagtccaagtcggagtctgctggtgcggagaagacgaacccgctcgggtggccgtaatttgtggtaaggttttgcatttcttcgtcggacaggccattggcatttaggacaactgaaattatacccttgccgtctggacctgcaggagagacccgtagaatgtgggcttggacattctctattacagatggatgtggtagagatgatgtcgcctccattgtagatggattgatgtagtggttagatgggtgagacggttttgtgtagacgcgataccactcgcgaagtgatacggtacatggtgaagagtaagagaagcaagtactaaagacaattcaatacggagtatagtaggtggtattcctctgttccaaatacggcgtaccccgtatgtataaacaaatacagcacgcgggatagaccactcgcgcagtgacgttgaatgttgatcgacaagtgtacagttgtatagcaacaacacatttcaaaccatgccactcccacaatgaccgacctaacaccaactctcaacaagctgctctcaaagcaaagctcaccactcccacaaaccaaaccctgcacagaaaccgccgacgagttcctaaaggaggcataccgaattgtaagccaccctcactaacactataccaaaagcaaaccagaaaacaaaacctaacaaaaagcaccacccagaactcccacatccactctctcctccaatacctccaatcaatccgccacgcctacctctcaacaacacaaccacaccgccgcaacccaaccccaaacaccaacccaaacaccaaccccaaaaatgcaaccccaaccccctcaacaaacctcacagatcccgaacgtgacgcagtcgacacatcaacagccctcctcctccgcgacctagcaacctcaatcgcaaacctctcctccgccgaaaccctccgccaagaaacctcacagaccctcctgcacaagaaatacggacactcggccgccggcgcactcctctggcgctgggccgggggaagcggcgcgctagacagcgccagcgacgagggcaagtccgccgagcaggtgcgtgccgaggagagcgcgcggttgatagcgacgatccgcgagagcgtgctttggttcctgcggcgcgggctggagtgcgctgtcggtgtgcagcggcggatggtcgagaagaggattgagagggtgcgggagaaggagaagagcgtgctttacaaggttggtgcgggtggggttaggaaggggtctgtttctggttctatggatagggctggggctggagctggggctggggctggaggtcggggcgcgggttcgttcgatcctatgtcccaggcgcctgatgcggcggttctgagtgaggcggacacggcgcggatcgaggcgcagctttcgccggagcagttgcagctttttgcggaggagaatgattctatgcttaagcattatgaggatacgttggggaaggtccagtatgtttctttttccttttccttttcttatatgttatgctgggtttttgttgcataatgctaaccatgccctctttagaaacgctgagaaatctctcctggagatctcctctttgcaggaaacgcttgtctcgcatcttgctacacaggaggagcatatttcccagcttgtcgcggacgtggatacgacgcatacgaatgtcgggcagggaaatcgggagttgaagcgtgctaccgagcgacggagtacggctcaggctgttttctggggtactgtcgggctgtgtacctggcttgtggtctgggatttggtcttctagtctggtgctactgaaggatttgtcggaagctttggagagctgttttataccatacataccattatgtctatttcattgaagtgtagcattttatctcaagatctctcggggaggacgtgattgttattgtgtctgtctaactgttgagtgtatacttcccaaagaccttactgttgacggcccggtctagctaaatgaatcgagattcatccgcggactagcgtaatgcacagaccattggataaaataaccctacgttgtataacaatccaatgccgcatgctatatctatcatttaaatgatggatatgataacgcaaggaacgagaaatgcaaatccagaccgaagtccagagtactatggtaaattgatgcatcaaatgaaagtccttccgaactttaaagaaaaagctcacgttcaaaaaggatagaattaaagaaaaacgccagaccaagtctcctcgagtgtttccactatgtcaagaccggggtatcaggggtatgagggaagtatcacaaagcagactcgcgaacaacactatcaaccgcctccgcgaagtagtcgatgttattcgagttcaagccggccattgagatgcggccgttctttgtctgcgagtagaagaagagttaggaattgtgattccagacgatgtaacactgggaaaggagggagaaaaacataccatgtagatgtgccacttcgagcgcaacgttaagacctgctccactgagagacccgtgaaactgaacatcccaatctgcgaggtaatatgatcccacgaaccaggcgtaccaagcttctcaagacgatcccgtaacccttgtctcatatccaggatccgcccactcatcgtgcgcagatctgcctcccattccttaaagagaacagggtcattgagcacgcgactagcaatgcgcgcaccgtaagcaggagggtttgagatctccgagcgctgcaggatagccagttgggaggcgatgtgagaggaggcagccgcggcgtccggaccgggcgcggagacgaagtggaaggcgccggtgcgctcgccgtagagaccgaagttcttggcgaaggactgcgcgacgcacagctcgaagccttgctcgacgaagtagcggatggaccaggagtcgcggaccaggtcgccggatgcgaagccttggtaagcggtgtcgaagaaggggaagtgcgaacgcgagcgcatgaccgcggcgatctgcttccattgttcttgggtggggtcgacgcctgttgggttgtgcgcgcaggcgtgtagaacgactacggagccgtggggtgcttcttccaatgctgcgatcatgccggtgaagtcaaggccttttgtcttggcgtcaaagtagggataatgggcaagcggtaggccgacgtttgtaaagatttggttgtggttcgcccatgttgggtttgagaggtagactgtgggcttgtgggggtggaacctggcgaggaagaggccgcctagatggacggcgccggtgccagagatggtctgcaacgtgcaaatctagggcggggttagtttggaggtttggaaatattggagtaaacagctacatactcggttttcacgaatggcagggctgtctgcgccgacgatgagtttctgagctgcagaggtgaagtcggcgagaccaccaatggagagatattcgtggttgagagtaggatcgttgtggatagcgtcatcggcctgtcgaagtatgtcagatcactgcggggacagaagtatagagatagatatagatgtagatagttagtaccttcttgacgaccgggagaacccagggctttgcgttatcgtcacggtaggcaccaatacccagatcgaccttgttaggtgaggggtcttctcgaaaggccttcataagaccaaacaagggatcctcgggtgcggcagcgacaagagccgccgtaaatactgatggattggatgagcccatgatgtgtgatgttagagaggaaagacgctcccttgcaatctggagcgaagtcatggtgaaattatataatcaaaaataccccaggtggtacaaaggtattccccggaatcaccgaaacgggatattcctgcttgcgttcaccggactggagtgagggggtggggttggctcgggggaatcagcgcgcgtcgtttgctaagcagaagaaaaaatagtatacagctgtaaggtgtacggagtacgttggtatcgtctttcattcttatattctatctcgctgcccctatcatatcctcggcgcacaagataccgagggagaacatgccgtatctttctcgttttgatggtcacatgccagtatatcgccagtgggactatgcttgattattataggaacacaaacgtacggacataaacacctgatggaaatctcaaacacattccctgcctccgacaggctgcacgcgccgattacaaacagtgtgtcatacaacgccgacgaaaaaaagacgcactgtggagacctttctggcagctaggatcgttgcatgataggtctctcagggggttgtattttatatgtctcaatggcctattaactcggtgggtatttagataactgcaggtataggcaatacctcgcaggatcggactttgaatatgaaacagttctcgcaattctagaggctccataattataaatccatgtggtatgtgtcattcccccacactcgtgaggggactaaaataactcatgaggagcatcccgggaccgagtctccgaagaagatttggggatagggcggacttgctccgattcttccccacagagaaatgatgatattgtttgtacagagatagagagtagtaagatcatataacgaatgtaataggatatatacagtacaatctaaaatatacgctgtaacacggcctaattgaaatgataacagaccattactccaaatacgcaaaacggggtatagatggtgtacggaaaccagattttgagtcagccgctgacgtaatcatcagccaatcggtcagacggtcgtgcctggcgatctcaacatcatgaggtgggtactttggcaaaggtactgaatctgatattctgatattgaagctatccggtacttatgtgctccctgtgacctggcacagcctcaaattattcaagtctacggtgtagggagaatctgatatcagataattcgatctgagtctagatctctgtccgcgtgatcgagatatgtcgatcccatctctatctctatctcaagataaatccaactgaaatgtacgtgaccctaaattcatgatatacaaaaagtatatacagagaagagatacaaataaattactgagaaaccagtctctcttttccaaccgtcacaaaacgccaatgctcaaacaatccaatggacaagaaataaaaaccaacccattgaaaaataacgccagcctcctatcgaagacctgaaatcatcggaatcataaatcgaaaatatatgcacgtaaaggagtaaaatcatcatgcagtagacggcgtgagatggacggtcgctggagccgccggagaaggcgcagtgtcggcgtccgcgggtgtctcagcctcagcaccgtgggcgcgggttcggatgcggaagcgatcgcggagtcgggtagtcaggccacggtgtgcttctccttcgggcgcaggttccccttggcttgcttcgcggacgtgtcggagcgcggcgagacgctcctcgacggtggcatcgcgcattcgtcgggcgttgagggggccgtggaggtagttggtgagacgacggtgagtatggcggtgggcttcttccgctgtttggtttggtccgccttctgcgggttgaccgggttggtcgacgttctcttcctctggattctcgggttggggtgggttcaggtcgatgcggctgtgattggttagtttgggtgttgatagttgataagttatcatatcgacataccagagtggacatgtgccggacacgttcattaaccacgggtcaatgcattccacgtggaattggtgattacaaggtagtacacgtaggtcttggcccttgacaaagtcatccgtgcaaatgggacacgagaagttacctccgtcatgcacctcggtcttggcttcgggggctgtgggggtggggcgctcattatcgtctggggttggcatttcggattcgtggagggtcgatatctccgtgtgaccatcggcctgaggctcggagtgctcgcgatcctcagggcttatggtcatctcgacatctcttttggccgcctcgacgtcatcatttttttcatcaaacttgacgaccggtatcgtgtctaacatggctcgagctatacctcgggctcgactttgccggactcgcccggcaatccggcgagggccgtatcgctcggggtggcgatgagcacggactgcacccgtgataatgatgcccaggaacagggccgtgatgataccggtgatgctgtacaggatgatcatcgctggaaaaagtcaacaaaccgagcaggatagaagaagtcgggatacaaaccagtgttcgggctgtcgcccgtaccaccggaatcactgtcagatgggacaccagagaggtacgacattgagacgatgctgatcgttgttgtgttatcgaaagcacggagtagtgcagagtagccgccttggctggtgaaagtaaagatgttgggataccggttagcaatcggatcattggaggtgagattgcagccgatagctgttttgctgtatagtagaatggcagcggatccagaggtgacgtattcaattgtctggccaacgcggatattcccggtatactcgtcctggtcgcaagatatgaaagcgatctgcgagctcttcaagtcgagcgaattgctggggatgactcgagtgacaacgccggacacattaaaggcctgaagtagtcagtggtgcccccacggacgataagagcgtatggcaccttgagtttgtcgtcggttgattgaatcagcgagttggttaaggggaccagattctgaccagtcagagtgcttccctcaatgcgaaacccggtggattggatccggacggtggtatttgatggtagcgaaacaacctcagcctggactgagaagaacaggagaaagaaaagaaacagtcccattgcgggagacggcggaatggaagaataaatgtgtggggtcacattagtcaagtggatggtgccctggtggatgagcgttgcataaaaaaaagagagcgaaactgggaaaaccagaaaatgaggggagagatcggccctaagagggccctaagaggatccaagcggataagagagattaggcgattgatttcggttattacatattatgttgttatagattgctttatcttgtagttatatatgttggagttatgttgtaggtttagggtacataactatgtcaggataacgtggttaaaatggttaacatggttaacaagggcatcctcactaccacatatacagcagaataatcattgacgatcacacttggaaacgtcatcgctggacttaccctaactacatctgcacagggcgatctttcgatgtaaatcagcatcatcgctctcgtattcgctgtcctcgcccaacttgcccagttagtgtgattaatattccggacttccgatcactgtctcagttcttctcttttaattttctgcacgttctatcttcagacccaaggcatttagcctgatcattccctggtctcaatgtggttttgatatgggatgatcctaatctgacatgcttactcgacttccaaggttcttcagctcaggattattgttccacgatcaacgctaccccgcagatacctattgaaatcaatgcaccccatgttatttgacccaccgagggaaagagagagtagaaaataagtaaagaggggtgaattgtcgaatagaccacacattagtactaagtgcatggatgtccagtctagtctcttccgaatatcaaatccggagagcgaacgggaagagaggtttaaagtatagtcctagcaccggattaagtctccgctttcttggtatgatctgatatgtaactacctatatatacttggacttatatatatcctatcgtatgagtgccttgaccctacataccatacagtccttcctcacccaaataaatacgaattcctcctgagtggcgagagtagggcctcggctctcatcaggcccggcgtgcattgtcttagtactccataacacggtgggaaaaaaagaggaaaatagaaaatagaaaacgacgaaaaacagccagaaaccaaatggaaaccaaatgagaccaagaggaaaggaaaaaccaggccataaagtaaaataacaacaaaatcgatctagatcatctccaaagaaagcaaagtaaaaaggtctggtattaatagaaacatctctgcctcttcctctgctcatttttagcttcgtccccctctctgagcggcaaaacccgcccttcaaaagttcaattctcccttccccatccttctcctccatttttgtcactctcgactcatctctccttttggggacatgtcgtgaaaaaacaccaatctgctttgtctttatcaccttcgtgggcaacatcatgcccgagaccgctaccccgagccgggcctggcaacaccgctttgacgggaagccaatctcgtcgtaagcatctttatagacctctcgggaaacgatggccgatggcatcgaccctatcaagtgcttcccctttctaatcccatatcccccccccacaggaatcccgccatcgccgaactcgatatcgaacggaatgagttggcccacacgtggaaaaggtttatcagcctcctcctgccccaggatcaggtgcaatgggaggaacggccacagacggtgctcgacgtgcagaccttgctcagcaatatcaaggcattttggatgtcccgcccccgacaacgggtctttagcgactccatggacttgtgtgatcgactcctgccgacggtgaacacgcacgcgaccctcctgtcgaccctcccggactcgatggcatatacccctttgttctacggagtgcttcaatcggtgatcaaggtgcgtgcataccgacacacaaggctacgtggcattgctaacctccggtcaggcgtcgtcacattaccctcgcgtaatggagggcctagctactgccctgctaaatattcacgatgctctaggtctgcccagtgattctagtctaatgtcaaacgccgtccaacatattaccaaaacctatgctctaatattcttctttctgaccgaattcatggactggtatgtgcggaggtccacgtgccagttgctgaacatgcatagccaggatgtgtactcggaattccatcacctggtactctatatacaactgcaagcacacaatattccatggcaacattccgagatggacgtcgacgaggaggaggaggacccatatagcgctcgggcactgtgggaggagtcccggctcagccaagtaggacgccggggaaaggaccgtcggatagcggcacagaataccatcactcgccggcttatttgggagattcagcaagacgcagcggagcgcaatcggtatagggagggccgggatcggttgttggcagagacattgagctccgtgcgcgagcaactggagccagtcaatgaacagagcaatggcattgtctgcataaccacgcctcctgctccgaatataggtaaagtcatatctgtctggagctcggttcaccgtctgacgtaatgacagacacgtcctcttttgaatggtcgcggggatccaagcgccgtctcgcacgccttgagattcaaagttcatccaagcacctccaggacttcttcgatagtgatgatcagatttgcgacttcgaacccgacgccaaagtcgtcgccgagggaaatatcgtcgcctctctacagcaatgggccaccagttcgcgatctcaggctttagccgtgggcgggactcaacctactgcttctctcgacccggtggctctaatttcggcttgctacgcttccttcgcgcggcaagctcgattgcccgtcgtctctcatttctgcgcccttcctagccaggaggtcaaagggctgaatctccaggagcaaggcttagttgccctcacctacagtataatccggcaattagtcgactggcttcctcctgtagtcgacagcgacgctgtcctggatctcagcgcggagcgctttcgccaactagacggaacgctcactagctggaaagccgctctatcgctagtcgacaccctcttacaatctgccccaccactgctggtctttataatcgacggcttagacgccatccacgatccgtctactgacggagcaatccgtgaactcgtccgcgtgttgctcacccacacccggcgtcagccccaaggtggtctcaacgggcaaggccctactctcctcctgaaggtactcttcactgttaccggcagaccgagtgccttgatcgagacaatgtcggaacacacactcatcctcagcgaatccaaaaccaacgaacccacgccgtccgaaccggtcctcacatcggacatcggagcggtcatgatgaatgcatgaattgtcacgcccagtgccgtttacgaaattctttttctgctgtttttggctaaaaaacgtttttgaagttcaagcatagatttgcgtgggttgggaatatttggatcttatgaaacaggcaccacaccacttatttatgcatgggtgtttgtcttcttctacaggcaaggctttcctgcgttcggcgttctcctgttgctttttggcgtccgggaggaccgaatggtttatttggtttctttttttttgtgcttcggtggtagtggtagacctgtactatactgcttgatagctgtgatacccatctaggtctaggattcatttgctattcttattttcgaacttgctcgtgctgtttaacggaaactcttttccgcgtcgcatctcggcactccgtatagccgatcacaatgcggggagccgatggacattggtttccgcctcaaaaaaatatttaaacggttcaccgaatgcatcaattgggatatacacatacacttacctatatgctgtaatacacacgatatacgcaatcatgaacggccacggagtttcgtcccgtctctactccccctccaccccgcaactcgccgagttcaaagacatttgctcgcgaaccacagaccctgcaacctacccactagccagcgaagtcaaatccaacatccccatctacgacctcgcggccctcgaatccaccggcctgacagcagaccttatcaaccgcctgcaagatgaatggcaccacatcctccacaccggggcgggcgtctacgtgctccggtccatgtacgcacccgcgaaatacgaaagaaccctaaacaccaccaacgaggccttcaacgcgatcatcgcgcgcgaagccgcccaatcaaccaagaaaggcgaccacttcgccgtcggcggctccaacgaccgcatctggaactccttctcaaaacacgccctgcaagacccatcctccttcatcgactactactccaacccgtggctcgcaatcgtctccgagtcctggctgggcccggcctaccgtgtgaccgcccaagtcaacgccgtgcaccccggcggcgccgctcaggaagcccaccgcgactaccacctcggcttccaggaagaagtcgcctgcaagcgctacccagccgcgacgcagctgacctcgcagttcctgacgctgcagggcgcggtcgcgcacagcgacatgcctatctcgagcggcccaacccgcttcctgcccttcagccagacgtacaagtccgggtatctggcgtggcgcaagcccgagttccgcgctttcttccaggagagctatgttgcgctgccattgagctttggcgacgggttgttctttaacccggcgctgttccatgctgccggtgctaacgagatggatccccagaatgggggcttccgacgtgtggcgaatttgctgcagattagtagtgcctttggaaagcctatggagacggttgattccgtgccgcttgtggatgcgacttgggatttgctgcttgagcggttccgcgctgctggcggcgctttggcgacccaggaacttgaccctgatacgtattcgttgcagcagagggaaattagggcttttgtacaggctgttgcggagggatatcctttccctacgaatttggatcagagaccgcctgcgctgagcggcatggcgccggagagtgagcaggatattgtggtgaaggggttggagggtggttgggataggaagcaggttgttgctgcgctggagaagatccatgttgactcgcgggcgtaaagcaggggtctttcatcccttgcgctgacagtatataccagtataaattaaatatattacgtgtgatgcatctagaaccagtcgtgtgttctttttccccgactaaccgagtcctccgtcactagtcaactagactgttttgatctcaagccacccgctgatgagagttgctcattggacgatcagacctcatcgcgtgtgggggttgtagtggacctgcatgtcgaacttcgcgttggagatcttcttttcaggacacgacacgcagtttgtgcattcaatgtggtagaatagatgaagtataagcgaaatggggacggagagggtctgcagtactccgtgatatggagtcgatcggtcagatacacagactaatcaaaagcaacgaatgacgaggctggaaagattccacaggggggaggaaggggaagatggcggtctcacatttttaccctgttcccccccaacgggtcctgatgaaacacggcatgttggatgtatccatggcgttcgcgtttttcactttcagtcttccttaagtctctacgcttcctttctttcttcctctctcgcaacaccctcttgggccctagtcattcatttactgtacatatgtacatctacggctttggtttgatctctcgctactaaccaattcgccgatccacatctccacctacttgttgaccattgacattcgacgatcgactaccgagtttacgcacactgcgcacactggtccgggaatcatacgaacccataacttggcagctatcgcgagaaaaaaagtacagccgcggaggttattggttcgcccggcgagggggaggcaaaaaacaagcagcgctaccaatagttcgtgtgctataacgggactatttttttttgcgtgtctccaccatagacacgaaagcccctccgcaatcgaaaccactgtcctggtttaggggtgggcccgcattgacgcaataaaggtcctgtctgccttccaagcttctcgcgatgggacgttcgagtctttccatcaggcgactgacggctcaccgatttgagcagctgcacgacatgccggaccatagcagcggcaatgggatgctgaatcctaacgatgtgaccattgatatccctctgaccgagacgacttctcgtggtcaaacgggcgcccgtaaatggaacaccaataccagtgcccaggacttccactcccagaccacggagaaggcacctattgttggcgttcaccgtggtcctggtggtaggcgtcgcatggatacagaaatcaatgaaataaccggaaagcctgctgagtcgcccgaagacggcactatcaaccgtatgggccgtttctaccaagctgtcctgaattactccctcgtcactcgttacctgatttatgtccttccaattgcgattctgatcgccattcccattattgtgggcgctacggcggcaacgtacgccaaaattggcggtgttcatatctactggttcttcacgtggattgagatcgtctggttcagtctgtgggtgtccaagctcttcgcccgttacgttccttatgtcttccagttcttgtgcggtatcgtcagctccggtacacgcaagtatgcgcttattctgcgcgccctcgagacccctattgcgcttgtgctgtgggctgttatttccctcgtgaccttcttgccggttatgacattgactcccggtaagaaggcttccggcgacacggctcccaagtcgtgggagaagagtatcaagaatatcttgtttgcgctgctcgtgtgcagcctcatcttcttggctgagaaagctcttgtgcagctcatctcgatcagttaccaccgtaagcagttcgatgccaagatccaggtctccaagcgcaatgtgtacttggtcaatctgctcttcgaggcttcgcgcaatatgttccccgtgtactgccctgaattccaagatgaggactcactccttttcgattccatcctggttcaggcttgcaataatggtggcaagcggtcctccgctatgcctctccgcatgctccgtaatgtcggcaagaacgttggccgtgttggcgacaaggttaccgctgcttttgggcatgtggcgtcggagctgactggtaagcaagtctttaacccgactgcgacacataccatggttatcgaagcccttgagcgcaagcgccatgctgctgcgctggcccgccgtatctggatgtcgtttgtggtcgagggccgtgaagctttgtacctagaggacattgttgaggtcctgggtgttgaacacgaggctgaggccgaggagtgctttttggctcttgacagggacggcaacggtgatatcagtcttgacgagatggtcatgaccatcaccgagtttggacgcatgagaaaggccctgaaccacagtatgtacgacgtcgaccaggctatccgtgtgctggacaacctgcttctgtgtgtcgctggtctggttggtgttcttgtcttcatttctttcgtcaccactggattcggtaccgtcattgcggctggtgccacttcgctgctctctctcagtttcgtgttttccgttaccgctcaagaagtactcggttcctgcatcttccttttcgttaagcatcccttcgatatcggtgaccgtgtcgaggtcagcgacaagcctttcatcgttgagcgtatctcacttcttttcactgtcttccgcaatgttaccgatgcccgcatcacgcaggtgcctaacaatattctgaacagtctctgggttgacaacttcactcgtgccaaggctatgcacgaacagcttgtcattcccgttgccttcgacaccaccttcgctgaggttcaattgctgcgcactgaaatggagcacttcgttcgcgacaaggataactgccgtgacttccagccggatattgacatcgaacttgacggcgttggtgatatggacaagctccagctgcgggttgacatccgtcacaagtctaactggtctaacgagactatccgcgctgcccggcgatccaagttcctgtgtgcgttggtcctggccgtccgcaagatccaggttcgcgctccaggtgttgcacctccggcagcagaggatgccgacgctgcagatggcgatgacaagggtgatgatgccggcgccggtgcagacgtaggtcaccgcaagtctacccagcccggcgcggccgattcctctaagcccgatcccggtgtcgccgctgccactgccactgccgccggaggtatcctcgaccacgagaatacagcccagtcgacaggctacgaccaggatcgagcaggaacagtcacccatcgcggctccacccaaaccaacgccacacaaaccaacgccgagcgcgaagccgccatcgtcgaactgctcaacgcgcgctccccaactgtcgacatcggccgcgatcactacaacggtcacgagtcagccctccaccgcacagccagcaacgcctcccaccaaacccatctaaacgttccccacggaagcgaaggcatcaaccgcggcctgtcaaccggccaccgcaaggccggcgatcgcgcctccttccaggagcaggatacacatcccgcgctcaggaacccccaagcccctctctccccagtgcccgccggcatgaccccatcctcaagccaagtccccatccttgagacccccaagcccggctcccgtggcagcgcccgctacgagccacgtcctcacgcaagccaggacgaaaagagcaccatccagatgctgggctcccccgaccccaaccgcttcgacggctactactcccacgacacggggtacaatcaaattccgctcggcgggtacagcgctgagaacacaccgggacgcgatcgtcgcgactccaacccgaatatctccagcgtgacggcctccagcaattatcaactctctgaccgatatgaccccgcctcgtcgccgtccatctactccccgcctcagcctcagccgacggtgccacagcaggctgtgacctacaatactgctccgctgaggaagaaggagaagtctccttatggggagcatgaggcttgatcgttttctatctttgtttttgtactgactccctctccttgattacacattcttggctagctgcatctttgcatctttgcatctttttgcatctcctttttcttcttcttggttgttcatattatgtgtgtgatgtatatagattctttcctttgcgtttttgagccgcataaaaattctcctccccttcgtggtatgcggctatgaacctatgctgtcctcggtttttgggcatctaaaatcaaatctactttccttttttcaggacgattccgttggtgcttggatggccatgctacataccgatgcctcttacaacagagacaataggataggcaagtggcattggaacagaaaagaaaggtgctgggactatgctttataccaaaagaaagctgtgatataatacttaataagattgaaacgccccaacgaaaatatcgagcagagaaacagatcatattcccataacctaacacatcgaatacaaagtgatataatacaagtttgactacggagtaagtctaggcaaaatagagctagccacgtccaatcccatcttccaacctatttatttccagtctccttccatggatatccaacaggatcatccttccgcgtccagatcttggtcttcctcttattaaccacatgctcaacaaacacctcgcgcgtgtacttggccttgtactttcggatccagcgcgggtcccaaagttcactcgcaatgcctagatccttgcagcagcgcacgagcgcgttcgatcggcagccttctgtagcggtggggataccgtcgggggagaaatagtcctgttcgccgcgggcgacggagacgaggctggagagaaatgttagctagtgtttaggttctcttgttcctttcccaatacagcctggatgatgaaatcaagactgtaaagcagattgcatgtaaacgaaaggaaaatgtaaatgcgcttaccgtccattacaaacaagagcatactccctcgtcaccgtcttgggcgtaacgatactctcactccgcggcacgagaccccacccgccaggaccgaatgcgcggttgagaatgcgtcggtatttgatctccggcaggtacaggataccatcgggcttgatctcgacctcgtctggctccgtctccgccagcaggatatcggccgcttctttgggaaacggcgcggcagacagaccgtggaaggatcgcgtccagtcgattctctcttcggctgggcgctcaagctcgagcggtttgtctgataggcctgttttggagatgttttcggttgttgcgcggctgggggttgcgcctgggaggcgggatgcggggacgcctgttgggatgggtgttgaaggtgatggggtgggctttgcggcgggcgttgctggtgttggtgttggtgcgggtttggcggtgttctggtttttggtggtgtagctgattgctcttctggtcatcgggctggagaactggctgattctcatgttaggggctcttgaagagcgcgaaggttgtgtcgcattttgaaaggactcgattgcgcgccaggaccggatacgaagaggagcagacatcgtggcttgtattgttgatagcggaaggaggatggaggtcttgcgaaaagcatatatgcagtcacgtgatatggatttgatagcttcgttctgtcaatgttgggataatcgggtgaatattgagtggaatagattgcagggactatttgaacatggtattataggtagagtacattatgcgtctttggtctgtgttcgctggtcgttgccctggcgcttccagcactcgcggaaagcttccatctgtgttgactagagtcagtatgatctgggtaattgaagctatttgctattcctcccattcattggactttggaagttgtattatggttattgcagaactagccctcaatggctttaggtggaatgatatatgttcagttcggtagatttgatagctcacctcttttttgcattcgcgccagtccttctttgcgtagtaacagtcattcatcttatcctgctcagctaatatgtattagtttagcctttgtgactcaaattgagtataagttactatggcagcctgtgctgaaaatccgcttatccctgccattgcagttagcaccacgcagaccagaaacctaatacagggcctcaccaatcatccggctcatcatcatcatctgggacaacagttgtcttctccacgttgttcgacatggctgaggtataacaaggaaagttggagaaaggcggttggcctcggcggaagatggagaactatgcttatcgcatgatctgcctttaccacgaaccaacaatggcaacgccaacgggcaacaacgccaatttcagtggcaaaaggcttaatgtcctagtctattccggttcgctcaatttactcagtctggcagcttaaccgatttctaactgatgacttcttgacaggaaatggaaccaccgttgactcagtccgtcactgcctctacaccctccgccgcctgctcgctcaccgctatgccgtcatccctgtgacgggcgatatgctccttaatgagccatggatgactacgtgtgctatgctggtcatgcccggcggtgcggatatggggtactgtcgcacactcaatggtgtggggaatcggcgcatcgcacaatttgtccgtaatggcgggcggtacctcggcatgtgtgctggtgcctactacggaagcaaaaggtgtgagtttgaggtcggcgataagacaatggaggttgttggggatcgcgaattggctttctatccgggcatctgtcggggcggggcattcccaggcttcgtttaccacagcgaggcgggagcacgtgctgtggaaatcaaagtgatcaagggagctttgaacattggcaccgtgccaaccaacttccggtcgtactataatggcggcggtgtgtttgttgatgcgctgtcgctcgcagataaaggggtagagattcttgcgagctatactgaaaaattgaatgtcgatggaggagatggtacggctgctgttgtctactgcaaattcggtgatggagcagcagttttaagcggacctcatcctgagtatgttttggatttcaattgggaggattaagtcactgacttgtgactagatttgcggctgctaatctggacccgaaggagggcggtcctgaatatgcggacttggtggcggctatcgctgccgatgacaaggaacgaacggacttcttgaaggcttgcctgtccaagcttgaacttgaggtcacacaggacacgacaacagtgccttcactgtcatccttgcacatgtctggaatcgatgccgatggtcccatggatattctgtcgggtcttggagcttcattcacccaagagggtcatactgagtatctcaaggatgactacgatacgttccgcatcgaacgccctggaacatggaatctcggtgaactagaagaagcactccccgcaacatcctcggagtctagcgatggtatcattgattaccaggcaattattaagcgacttgtgttccacgatgatataccatcttcgaaactgactccatacttcaaccaccatgcattctactcccacctccgccaataccaatctgactccaagggagacgctacatcatttggctctaatattctatatggagaggtagtgactagcacgaacacacttcttgaaaagtaagcatttggtcaatatggcatttaatcggctctaacaattagtaggaacacgaagctgctgcgtcagttgccgcagggttttacggctaccgctacagcacaaattgccggacgcggacgcggatccaatgtctgggtctcaccagcaggttctctaatgttttcaactgtggtgcgacacccaatggacaagattcagacaacaccggttgtgttccttcagtacctatcggccatggccgtagtccggggaatcaagaactacgccaaaggctacgacaagatcccgataaaactgaaatggccgaatgatatttgtacgtgcgggtggcttgttttattactatgggttgttactgatagatctctacagatgcattggatccagatgaccccgaacagaaacggtacacgaagatctgcggcattcttatcaactcccatttcatgtcaaacgagtacatctccgtcgtcggtgttggcctcaatgccacaaacgcctctccgacaaccgccttgaccaccctcgccgcacgctacgcgtcgccgggagctgctgccgcttcacctgtcatgcttgagaggctcctggctcgtattttgactacatttgaaagcttgtatacccgcttcttgcgcacaggcttcgatcgagccttcgaggcgatgtattatgaagactggctgcacatgcaccagattgtcacgttggaggaggagggtggtgctcgcgctcgcattcagggtattacgcgtgattttggtcttctgctagccgaggagttggggttcaatgatcgtccgacgggacgtgtgtggcagttacagagtgatagtaacagctttgacttcttccgtgggctggtgaagcggaaggtgtagaccaaaccaaaacagataaataggtcgagacatccatgtctataactactagttcatacatgtgattttgctcatcaatatcccaaagaattaattgtagaccaacagacttaagcgggaacaccctcgaagattgtccctaggtataacaatcacttgccgtgcgagggaccagccagacaaaagtcatgttatcgtcgtcggtggccgcgaatcatagactttgtccttgtccttgaaatgagaggcctcatcaatcgaaatgttcgcgcttatacatgaccttcaatataagcccttttctcaaacaactccccattcagatatgatgtggcgatctaatgtgtatgaagacgttatatatgcagtcggaaaaaagtgcgtagtataggatacaatgtcaaggcctcgactcagcccatgagacccatcgtcggatacactcatccaccctcctcagcgactccttctccgcctcgacctcaaaccactcccgatgctccttcccgcactcgggacattggcctaagtcctgtatacgctgagccgctagctcaaggtgaatgagtcgttccacgcgatgcacatgcgggactttccttcccggtactaaagatgcgctatcctggctagggtgggatggcgtgtaaggatagtaacggatcaaggtcaagtcatatgagcactgtttactccattcagcaagccgacgatgcacattgctcgtgcgtccaattttcagcctaagcgttcccggcttggttgatgtcgggttggaggtgagagcgttcatgtcttgtgctgcacggattgcgtcgctgacgctgcgtggctgcgtgggtgggcggaggctgttgctgctttgcggggcctgcggtagtagagaagatgctatgtctcgcgctaccgcggattcagcgctccgttgtgtggtagttgtcgggggtgtcaaccagaacatgtagatatagccttcgtcatcggcactggatattggtttggccagttctgcaataagaatggatgctgtctgcgggggaactgtagacgggatccacgatgataagggcctgtctgacaaagatggtgacacttgcgcatgctgcggccttccagctgtagcgggcattgcgacattttgatttgaagaaggcggaacgccataagccgggcgaggcggtctcggctgaaatgaggtcggcttgtcatcctcgccgctgtcctctccgatctgaaagcagcagcaaaatgtgtgtttcctccggcgacgcttttcactaggcctactttgatatgtatggggaggctttggcttcgaggagactggatcgtttatctggagcacacccagtcgatccaataatgtatcgatgcttgtccttgtcttaactggggtgatgccattcgtaggtggattcgccgaagtatcttgatctttgtgctgccagcagtacaaagatgctgcatctatagcttcttgacgaggatccctctttcggggggtaggagcaggtgatggatttggagatgccaaagagcggcggcagggccgaccttgggaagtgatgcctctacatgttgtcgctgggtttcgagaatctgagcgcggaagcaaagattctggagtgtttggaatttgaggcatatatgagatgagatcaagtgaaagaatggtatatgttgtagatttctgcgacgtgaacttaaaatgagaaagaaaccattagggaaaaggaaaggacactaggctatgaattgcggtgagcttccaaaattcagcccagaggctacatattctccacttggaccacgtcagtgggacgctgggcagctgagaatagaataggagacttttgttgttgtttttttggtgatcggttgcaccgccacagtaaggcggtgttgtaagtggctgtgctcatgctcattgcctcggcataattggacaagttgtacttgattgctttcattcagtttcaatgattgacctggatataaaacttcaatatgtcttatgttaatatctttcaaaccaggccagtgcttgattctccgcttcatcggcctgtctactggcatcttcctgaaggaaatcagccctgacacagaagccatggccagcgccctcatagaccaccacttcaccctttccaataccggactcgctgaggaagacctgtttgatctgctcaatgtgcggaggtttcacgaccatatctttttctgcaagcgcaaagcttacagggattctgattttctcgatctcgccaggaatctcgagaaagctcgggtggcccgtaaatccagcattaagcagtggttttccatttgaagccgtgtctgctccggcagctagattgacgatatactttccaccccagcagaaaccagctccgtagataggaacctcggcaccttcgttctcgcgtacggacttgaagaagtccctgatgataggccatgtcacgccgaacgtattgtagtacatgaagggcaccattcctgtcagcattgaggctagatagtatctatagcttggattagtagaaagcccgacctgggcggtgttttatcgacttacggcttgataagccaagttgtgagtccgctggtattgaacagctcttttgttgcagacagcatactgaccggggccgcatgtcctgatatcatacttaacgagttatccttagggatgacactaggacataccgttcatgaactcaggtagataaacgaggtacttccccttttccgcgtagttatcggccaagattcggttgttcacaaactcccacccgaaggcgtcaggcactatgatgataattccccggtgaggtacctcatttagaggtttggtcgtgtaggcctgtaagccatggagagaggtgatttcaccacggggaatgccttgatggatatccccactaaaacaattgggacacgacatgttgcgatgagagttaactaggctgataattgcaggatgtgaagtgcaagagactccaagcacttacagattacccctctcggccccccgatcacactaaaccggattaggtcggggttgatatagatcatcaatacgagatgacatttcaccaaacatcaatgctagtgatctcgggggccttaggcctccggatagtcatagcggagagaagtgactaattccaatttccgaggccacgtagtaattagagtacagggggagaacattaaacactctgcccgcacggagtctagtaccttcagaacactctctgttcttagcatctcgacaagattagtactaataggtctctcgattgctagcacgcgagctaaagggcttcaaataacacgagtagccgtatctagcgaatggggattgggttgcttggcgagaaccgggtatgtactttgctctatcaggtgggggcttcctatttcagccgctttaatgagggcgcttggagtcagctgactcagagtagatttcagtccgctcggagatagtcacgtgatatattagtcacgccattgagagcccctggggccccgggccgtgtccacgcggattccttaattagagtttgatcagagacatctactgactcataagaaaacagggacttacgcagtgaaaatgagacgaagaagcaaaaacgcattcgatttagaaggcagatacacgcctaggaaggtctctcagtttaagaagcttcagaattgatcactgggcgggtagaagcaaatgaaaccgggtttacgaccacgtacaaaacactccccggggtgtggaatatacaacatacagattgccaggacgagaaagagagacgtgtccagatcgatctcatattgagttttattttaatctaatagccttttagttgagataaatgcatttgaattcaatggggacctaggtatattgagactgattcggctctctgcatgtctgtctttggaaaaaagaggcgattttagcggagatgcttcttggaaaaggtaagcactagctgtttcaagtcattagttgaggggccaactaagtaatttacaatagaaaagccgcactaagaaatcctaacaaattagagttcttctggtagcgatctctgtactatcggaagtgctgcctgcggaatctttcgcatgaaatgtaaacccgcaatactataaagacgccagggtctcgtctcctgaacgagaactaccaccttcttaagcccttcaatcacctttgcatcttctcctagcatcagtcaccatgtctctccctcctgccgaaaagctccctcttgctctcaggaagaatagtccgtatttcatcatcactcccaccgttgctgaggtacaaaaaagctgactataccttggcatcacagttcgcgacacgtatgagtctgcgaaagagaccattgaagccaacatatcgaaatcactcagcgtcccatggacaattgaagtgaaccctctcgcattatatccttacgcggactcgtcttacgccaaggatgacatgggtgcgatgattgtggagtaagctcacaccttcgtatcggcaccagtggatagtgctgatcttctacatagatacttcaacagtgccgcgtctcacctgaacaacgttgacgagttcgcaaagaccgagatcaacaagttggcccccaaccatgttctgtcattggaagtcgacagcacgcttgaccttaaatacaacggcgttaatttcaacgatggcaacttacgaattgtcgtcaccccgaaggggcttggtgtcaacatagattctgccctagagagcgacaatatgaagctaggactcaatgaagcggctgccaaagctggcggccaggacgacatcagctacattgctcgtgacaacatcggcaagaaatatgatccagtcatcaccaatgtgaagaatcggctggagcaacttttcggtcaaccatttgagcttctcccgaactttgaagacaacttcgccaaagtgaaaaaggagagtcaagtccccggcacaaagctgccggatagttgggaaacaaactttggcgctacggctctggagtacttcgagtcgctagctacacatcttgattggaacaactttggcaaagatgatttgctcaaagaaggattcctcgagtccgtcgacaagggcaaagtcgcactgcgtgtggtggacaagcttgaagggtccagcaactacaatgaagccaagatcgaggatggggtgctatatctgcagaccaaggcagatacttggggtgtgaacacaaatcaagcatcccagaagattgtggatctcctgtaggcaccacacaacaaatacatatctagcccgagcttggtagaatttatatttatactgtgcaatatacttcataatctcttttatagcttagtgcccatgttcacatgaaccgccttagtctggctatatgcctccagacccgcctctcccaactcgcgtccaataccactctgcttcacaccaccgaaaggaatgcgcggatcacagtcttggctactgttaatccagaccataccggactcaatctcagcggccacacggtgagcacgctccaaatcccgcgtgaagacagacgcacctaggccgtaagtgctatcgttggcccgacgaatagcctcttcctcggtatcaaaggggaaaatcacgacgacaggaccaaagacttcttcgcgggcgatgcgcatggaatccgttgcattgacaataacggtaggttgaacaaagtacccattcttgatcttctcgtcagtcggcgtgtaggcagcaccgccagtgagaatagtagctccttcgctcttggcgatttcaaagtaggagaggatgcgctcatattgcgcgcgtgtcacctgcggcccgtgggagactgtctcgtcccactggtctccgatcttcatactctccaccgtcgccttgtaactagcagtgaaggcttcgatgatatcgcggtggacgaagatccgcgaggtggcggtacagatctcgcccttgttggacatgataccgccgtgcgaccacttgaccgcctgctccatatccgcatccgggaaaaccagcaacggggacttgccgcctgtttcgagcgtgatgttcttgagagtgccggcggccatcttcataatctcccgggcggttattgttgatcctgtgaacgcgaccttgtcgaccaatgggtgcgaaacgggcgcggcgccggccccnnnnnnnnnnnnnnnnnnnnnnnnnnnnnnnnnnnnnnnnnnnnnnnnnnnnnnnnnnnnnnnnnnnnnnnnnnnnnnnnnnnnnnnnnnnnnnnnnnnnnnnnnnnnnnnnnnnnnnncgccaagggggcgcaaaaggggcgcggcgccggcctcgcgcccgtagccgttgacgatgtttaccacacctgggggaaatccggcctttttgatcaaagtaccgagaacgagagcgctaagaggggtctgctcggccggcttcagaacaatcgtgtttccacatgctagtgcagggccaagcttccaggtggccattgaaagggggtagttccatggaatgatctggccaactactccaatgggctggcggattgtgtaggcgaactttcgagatgtcgtggtgatggtttgaccaaaggtcttatcagcccagccgctgtaatagcgaattgttgagattgcctcggtgagatcatcattgagggcgacatggtagggttttcctgatttggatgagcaaattgacttttctgagtgatttgcagacataccattatcccaagcttcaatggacgcgaataactctctgctctcctccatcagatcagcgagtcgggccattaactgccctcgctctgtcgcgggaagtaatttccatgaggggtggaccagcgccgctctggcagccttcacggcgcggtcgacatcttgggcgcttgctgcttgaacggtggcaatgggtttatcggtacttgagaatagttagtgatatgtacaacagcgatttcgataatgacatacgcggggtcaagagatgtgatggtctggcctcctgtagcggatacagtttcattgttaatgaatagaccagtgggctgtctgtatttgtgcccgttaggcgtatatatatcaatgaagaggctcattttgtgagttgaacagttttcagagactccaactctcgaggcgcgtggggtctgatatagtacatttctccaatgaggttaagcccattcaggcaagtccttccgatatactctccgcggatgttcgaggttagtggatccgagattaaatgatagaatagttaactatcgtcaatttatcttaatcgtagtattttccattatctaattattccacagccatctctcatgtcagatcagggagtcatgtttagccctaatgcgccactcggagcttatattttctctcggctctgtttggctgaatatgtatgtcgcgagactaattctaattcgatacgctttggatatgaggttaatacaatcaaagaaaacaaactaacaagctcaatataactgaaaagtgacaaatatattgttctgctgcccaaatatgatatagccggctgttgatctctcgtctctggagtgcttcgtacgtacgctgctcttgctgtcacgggatcggcttgccatcttgagggtgtatgggagatgttggtgttgagtgcgcaccgccacggatttgcaacaatatggactaacagccctcatcgcttcctatttgggggctctggttcttcgcgccgtgtcggtcccaggccatttaggagggcgcggagccaatagctgttctagttcatgtatagtgctaattgactgcacggttcagtctcctcagtcgcggacaactagccctcaatggctcatttagttcggagacactgcagcttgcgatcggtctgtatataatagtaggcaaggtagtttgatcagttcgtacgttgtgctggtgctttttgatctacccgacttgttagggtgtagctaaaacccgtcttcgtggtcaagagtgcagtagaaggcaaggatggcatatagtggctcaatatgtcgtggtgtaccattccaccctagatcatcaattcgcttgaagaccaccgtgtgagctctaccgggcaaataactatatccggttgcaacatcttccaaatgtgcgtcgtgggtcagaccagattgcgggtggtgtggatgcagttcgttcgcggatagcactgtatcataagctggcagcatttcagatctttctcagtgtccgagacagcggagcgcagaaattgacgactgaagtttgggcgggtcgttgccactagcgacaatgtgatgccagtgaacgtatctgtgagactctccaatggaacaagggcactaacattgcccttggttgtgtcactaagtccaattccaagttccagggcctggatctgttagccgttctgaaaccgcgacaaaatgggtgaggtactggagcagcatgagaatgcccgctttgaacataggagcgttcgtgtacacgtcttcaagaaagtcacggatggatacattccggaatatcaatagagggtccagcacaccagatagacagtcagcctgtcttgaccttcttcaatgtgtatgtatccacaggtactattcatccaagctggcaccgaaaaggaaggaacgacatgcaaaactctaaaaaaaaagagtaaccaaacatatacgaaagcaaacgccttgatcttctgtgcattttctagattaaagctaggcagacctcactactatagagatgaggttaaaataaggtcgcctgtcaaatatctcctcaccagttatagttgaacagtgaggatcaaacacgacgatatacagattctgattggtcaggattctacaattcgcttaatttctaggctaccatggttcatttagcatagcttgactgtttgatcagaacagcttcaatctactctcattgatccttcaacctgtaatgagttctatctcgattagaactggaatttcgaaaattcaacatctacttgcaatgcggaagcctcaagatttctagaaaatcgcctataactggaaggatcaataatttcagcttggaatcacttcaaacttaatcaaagttacgtgatctacgtgcctgcctgtaggtatataagtagagccccctccccccgcgtgcgcgtaatgtaagtctgtaagtctataagtcatgaattccaaaatggcaagcaatagcacacagaacgaaactcctgcctggctgaattccgtgttccctggcgcttatggcctcattggcctagttgttgtcgtggccctggtcttctgggccattcggtacgtgcagcctgttttgatcgtattggtccgtcatgctaatgagatatatgtccagctttttggccctagaggccagacttagcgacccccaacgggcgctaacagatcatttcatccggcaagttgccgaaatcagaaaggccaaggccgcaagcaaaatggaggagaagaaggagaagaccgaggagaaggatgagaggaaaaagcggtgggcggactggttgctgaagccgttcggttagcataccccagaagtactttttggaagcataggtgttgggaaggatgtatactaaccaagagtgtccgtccctaggccttcttgagatttccttctccaccaatgccatgctccggcgcctcggcagcagcagcaacagaaagaccgaccaccccgttttatacgtcattgtggaggagtttggtgcttctacggcggaagcggaagccgagcttgaagacgtcgactgcgatggcattgtgatccgatgggtgcgtgtcccgcgcgggtaccgtctcccgcccaagtccaagaaggctagcacgttggccgaagttgtcggtgccctccagggcagaaaataaatctttgatcgtcttgtctctaccacctaccccggaaccggccgggatggtggattcgctcatcctttcctcacgcaggccgtaaccccctgctgttacttattgtatatacatgtcgcttgccatgttggcttgtttgggcccttgttggacctcgttggacctttttggccccttttggcccgtccttgtttgttctggattttggattgtttgtttgtcctcgggtgttttggagtttgtttttctttatttataccctggcgttggtgttggcggttgtgctgtttgttctgttctgttatcgttattgaaatattatttattggatccctctatgttgttggaccaaaacgatcctgatcatatcttgatcctctctccattgtagatctgcatgctcacgatacttgtgatgaggaaaaaggatggggcggcagaaacgctacccgtaagcggtcagccgactcacatatctgacagccaatcagcacgtaggatttaacgggcactcacaagtatgtaatcaacctccagggcttccaaggttggaaccttcagaaaaccttctacgcaactaatccattttaggagggtgatcacactatgactcagggatacctattaatgaggatcgtttttctatgctttcttcaatcttctcctggtcctgatgctcatattctacaagtttactcccaaagtactttccaaggctttcttatctttttctcgtgctaagctttccacccacgatcatggagcttttcttctattttctcaaacgcggagcagtagatttctaccggcaaatattcgccgatatgcttcttgccgagcacgctctgcgcgaactatcgcagcgtgaggaatcgctacatcatagagccatggccttacaaaagaccgtagctatcgagtctgatcgactccagcctgacaagaccacccctgtcgagtctaccagggccgaacttgaaaatacgaatcaacagcttaaagagatccaactgcaatattcaagaaaggagtatgccctttaccgagcgacctctgggcttccaccgtactttaaagaactttatgataacttaaggcgtgatcctaactggtttatgcgagaagaactagttcaggattgttcggatcggggcggctgttgcagccgggaatgtggatgctgcgcacagaggtatatgtttcaaaggaagaaaggcagaggtcattgcaccacagagtgccagtgctgtatcggctttcgtggcttcgagtttccagaagaagataaagaagagattagaagagacttcaaagctagggttgaactcgaggacttggcgtactttatgaagctgacaaggtggtctttttgcccgataaagcgccaaaggctttcaaaacaaaagctccggtggcatcgaattttcaccagttccaccgatgagaaagagtcatgaggatggccgtactttgcttgaatgtcgctactttgcttgaatgtcgctactttgctagagaatgatctgctaggggaatagattcttttgactagttacgtagataaagttgatggtgtcacagattagccagctattacagaagaaaatgcgaaaacattgcttcattctggcagtaatatgttgctcaaatagtccgagtgttcaggtagagattgcgcacatgctctttcccccgtgggtgtgcatgatggacttgaaggcctcgcagctttcattctcgtcgtacaatgagataatgcggattacatatctttttgcgaagacgcatagcgtccgcctggtaagaatcggagccttgggtgttctgaagctagcaagacgtaatcatggcaagcagttccagaggggagggggagtagtgctggactattctgtctgccatgagttgtagtagcccactggatacggagtacgagggaagaagatgtcgaccagaaatgacgcacttccgtacgttccttacctctggtgttgtattagtagacgaattagtcttatataggattccgatgaatagcagggaattagagctagaatagaaagaagccttcatcccgatgatagtaatgcatcctaaataggaaaatttgacccaacaaggcaagtcactcctctacagctcggaatgagtagaatcatgaatatggaaacggtaagagattccagcaaaatccaagtatatctagattatgaccacttccaattcaaccatcctcattatctttcccaaccaaatcatctcttcctctatacctctacaaacctccaaaatggcctccctcggcggaataatggtggccctaatcacccccttcacagacgacaagaccgcaatcgatccaagccgcctacaagcacacatcgagcacttgatcacagccggcgtgcacggtctcgttccaggcggcagcaccggcgaattcaccacactgacagtcgccgagcgcaagcaactaaccgagctctgtgtgaagttcgccgcaggccgagtgcccgtcatcgccggcacaggcagcctctcctcggccgaggcagtcgagctctccgtacacgccgcgcaagccggcgccgcggcgaccatggtcgtgcccccgttctacgaccccgtcaacctggaacagctgcacgagctgctgtccgagatccacacggcctcgggcctgcctatcgtctactataatatcccttctgcgtctgggatcaccctctcccctgcggagatcgctggtctgtccaaggtcggcgtcaagtacctcaaggatacctctggtaatgcgcccgcgctgacggagctgatcttcggtctgtcggatcagattgtctcgtttaatgggtgggatactttgactttctatggtcttgcggctggcgcgcccggtggtatctggggtgcggcgaatattatccccgagttggcggttgagctttatgaggcggtttccgtgaagggggatttgaagcgcgggcgggagatttgggcgaaggcttggcctatttgcaagttcttggagtctcataactatgcggctgctgttaagactggtgttgagttgattgggcagcctactgggggcttgcgcaagccttttgctcttctcaatccgaagttgacggcggaacttaagcagttgttgcagaatgctggagttaagactgtttagtattctgttctggattaagatgattgaatgtcggaatgagaatgtcacacttactatccactcaatttattgaatatacaacattggaatcttcttcgttgcgtcgtaaaagtgcataatagagatcgcagaacataaaaaagatgagaatagccacctggatcagcaaaacaatggccatatctgtccttgcttcacagtatcaacccacgatggcatcgattcaccccggttcgcggtcagatgctcatcctgcttgcaccacacttcagtgataatatttctggccgttccaaaagcggcaaagccacatattgagctcgccctatctaacatgatcataatcgcctcccgccttgcggttgacattgcctcacatcctgcaatgaacaacggccacgccgttccgggcccagtgggatcatcttgcgtcaatgtcgcactgcacgcttgaagcgctgtgataacactatcaacatgaccctgcagagccgcagggtgggtttgtcgaattcgtctgtaaaagaaaattacgagagctgcattcaatgcctccaccatgtgaccgtgcgattttgaatcggcgtggagttccaggattccggctcttgttcggcctaggctgaaagagcagatcatgttttccaggcgcgtgctacgtcgctgtagtgtttcccatgcttcgaggttcatggtctgacctgcctcacgggcaatacggaatatctccaaaacgttggctagtcttgttgtttgcgagacaaggctaagccatgtttcggtgatgccataaatttgcttgtataatgtttcagggtaactccgtgagtcctggagatgaatgtcataaagtcccgaagcttggtccttgggttcatcgatattcagatcactatctgagttttgtgtctcgaggcggaggaaatcgtccagccgaggatttggctcagtgctccccatttctgaactcggtgaggatcgtgattgaaaccgagaaccaagtgcttcaaatgaggagggagagaggttatagtcatgtagaacaaatgtgctctcgccgactattcttagccaggtgtagacatgatgcaaaagccgtgcctttttggaaatccgggtctttgaaagtcctcgaagacgtagtagccgctctgcatcaatcataaaacaccgggcgtgttgttgttggccggacatgatctgtgaaagtcagagtcattcaattgaggtcaaattgaaaacccacggtgtactgtatgagaatgaatgcagccatcagctggtctttatattttgctttcttcaaaccctgggtttctgaatgcagagaggtttgcatatggtccttggcttgcagatacgcctgggtggcaaccttccaccaatacccaggcggctttgtcgatattgccgcggggtttaaaacaaggtgaatagcagagcaggcgagcaagccatacaaatttgcaagtttggcatgactgatcctttcagtcccaagaaaggtcgagtcactgtatgtaaccaccgctgccggcacgttcaaaatcttccaaggcgacttttgccgacagggaatggccattatgtgtggaatgacaatatcctggaaatgtctaagcaggcacggagcatctttcagtgcatctatatcagtagaaataagctcagctggtgcgtattgtgttgtgaaagtctgcagctcattggtgtgatttaagtcaacgggcagtcccatctcgtggctcatatcaaatgataaatcattcggcgtactcaaagcaccgtttgctgcaaactccgtctggcctaggtcaaagctcaacagatcagaccaatggaggaagtcatcaatatgagacagggaatcaagtggactaggctcttgcagttcctcaggagccatagtttcggcctcaactgcaaaatttatatcagacttcacgggctcaatttcatgcaccagttcttgtggcttttgtggtgccgaagaaaaatcaagaaccgcaaagggtccaatgacaatgtcaccgtcgagcgaccgttcagggtctcgcagtctcgagtccacttctgccaatgatgcgtcaatagagcctgatataagatcggatccaagcgcagtgctcatagaaactctagattgctctaaaacatgttaataacactaatttgttccatactgtcaaggccatgtacctgaataaagataccggcgagtcccacgagtactctcagcctcctcgccgctatcagtgcgcatccacagtacctgatcggaatatccctcgcatttcacacccaaggcccggcaggtacgacaaacgggccgtttctggtcgcatttgacatgccggcgtctgcaggtgctgcatcctcctagcgcatgggatcggcgaggtcttggtcgtttagatgtcaccatttttgaagacttgatatatatattcaattaaaagagcttattgcggattcatttccatattagaggttgggaagtcgaagttatggccaaccccgccaatatcggaagcgccttcctagatgggatctcttatcgggctatctcctcggagtcaactgctcttgtctttcttttgacaacaattccattccaatcagatcatctcgttgtttgccataaaacatcagtgggacggccaaatcagattgggccggtcaagttgggaatacagctgtcaacccgtttgtttcgcacctgcagtggatgatgtcgtggacttggtatacacgttgagatcagaagtggccgtccaaaacacacacaaggctcgctctagataccaagaacacagtgtcctgagccgtataagcaactctgactctctttttgtagagcctttccttaccagacttgaacccagcacgtttgacagcccatgcgcaatctcctcgacgctcttgtatgaatggcgctgatgtcggttgtataagtcgttggcatttggtaaaagatctgtgcgactgaacattgacccatgacattgtctgaggaatgtcaattcggcaagcgactccgatgatcgtccgtgataggaaaccaactcagaaagcactctataccaaagagaaacaccttatgcacatctcaatccggaaaagggatgacctcggaaggggagagaccatcgggaatccttcatatttgaactgtgccgtcgtcgccttgctctatccattcttcttatccaaattctataaccacatcctaatacatacggtacaatggctcaccgcggggaaacccttcacaaagatgtatgctgcattgccgacctgaagcaaatggggagcagtcggctgtctccgatggtcagaggtgagtaccaatgaatagtttccgacgttggttcattgtgccagtgctgatgtcgatagactactacaacggaggagccatggatctaatcacgtatggaacctcgaagcgcagacccggtccatctccctgacgtatgtctagtctgaacgagaacgaagcagcctacgaccgctacaagatccgcccccggatcttaatcaacgtcgataaaatcgacacaaccgccgaaatcctcggcagcaaggtatgttatattccacttcaacagaaacgaaaacaccagtgccaactccgacaatcaaacaggtctcactcccattcggcttcagccccgctgcatcaatgaaactcgcgcacccagacggcgagctcgcgacctcgcgcgcagccgcaaaatacggtctctgcatgggcctgtcctcatactcgaattatccactcgaggatgttgccgctcagggcaccggcaatccgtatgtgatgcagatgtgtgtactgcgggatcgggcgattacggtgcagttgctagagcgggcggagagtatgtatcttggatgctttttttcatggttgactacatagaccgtactaatatccttttcagaggcggggtacaaggcattattcctgtcggttgatgtacccgtgttaggcaagcgcatcaatgaataccggaatgagtatactatcccggacgatatgtcgtggccgaatgtgcttagccacggaggggatcactcggatcgtaccgagtatggtatgtattgcgaagctgatgtggagttattgtgagggataggtaaatgctgatgttatgcagaccccagtttggactgggataacacgattccttggttgagacagcatacatctctgaagatctggcttaagggtggtatgtttgcgtggagtgatcaagtaaaggggctcgcagttcactgactattggcagtaacgtctcccgaagatatagaactggccatcaaatatggcattgacggtgttgtcatttcgaaccacggtggccggcaactagacggcatgccgtcgacggtggatgcattgcgggcctgtgccccggtagccaaggaccgaatgccgattgcggtggatgggggcatccgacgcggctcggatatcttcaaggcgctggcattgggggctagcttctgttttataggaaggatcccgatctgggggttggctgtatgtgtttgtttgtttgtttgttaattgttctgtttgctgacccatacagtataacggacaagaaggcgttgaattggcgattcggattctccgccaagaactgaggatcaccatggcattagccgggtaagtgattattggtctggtatcaaattaataaaaattaatcggaagcaggtgccgaacgatcagcgaaatccaaaaatgctatctttctgttttgcagccggacggaatcttctcgaaactgtgatacaactgcgatactcggtatttttctctattttgaggcttttatcatacacctccctttgatatgcgcaatgaggtcatgtgctgcatcctcagggcttggtatgtcagctgtcacgatacgagtacttgttccatacaagccgtgtgccaagcccttggcaacccgacagggctgaaggcgactttgccagcgttttcctggagaacgaggctgtgcaggccatacgtgtgccttgtagcctacatagccacagttagtggaataaaacaaggggaaacatggagtcgcgacgtatgttgtatgttgtagagtctagacaccgagtctactcccggggcttgtcctgactcctaagcctcaccgcacaggcaacaccgttattcgttcctatacttagtaacgtgtccacggattgtacaccgtaacctcatagtgcgtaagcgtgtccttaatctccacgggcgctagttcgttgtttcaattttcgccgatcctccacattattggaaaactacatatagcgtccttttctcgcttttctctttttctcttttctatctctacctctgtataccttcactctgaatacacgctacctccaacgtacaaccatacaacatattcatacccatacatatacataccaccaatacaaacatgttcaacttcaacttcttcaagtccgccccggccaacgagcccaccgctgaaagctggaatcccaacaccatcaccatgcagcccaccagccctgctcccccttcagccaaccaaaacgtcgtctctgaacagcctgtatgttgatatcccataactaaacaagcccatcccaaaacataaactaatatcgccttagaccagccaagaacaaatgcagctgcgcggtggtggcggtctctgctgcggattgtacgtttctcttctatccctactaataaaactccaaactaacttaacccagctgcgccggtctcgcttgcttcgagtgctgtgagatttgctgctagacgatggaataagatgagatcgggatgtggccgccgatgcgctcgtgcgacaacaatgttgatggactcggccttgttgggtccttaagcgcgtggcctcggcggtctttgatgtgatgcgatgcgatttgatgcgatttgatttgatggactccccccccccctccccccccnnnnnnnnnnnnnnnnnnnnnnnnnnnnnnnnnnnnnnnnnnnnnnnnnnnnnnnnnnnnnnnnnnnnnnnnnnnnnnnnnnnnnnnnnnnnnnnnnnnnnnnnnnnnnnnnnnnnnnnnnnnnnnnnnnnnnnnnnnnnnnnnnnnnnnnnnnnnnnnnnnnnnnnnnnnnnnnnnnnnnnnnnnnnnnnnnnnnnnnnnnnnnnnnnnnnnnnnnnnnnnnnnnnnnnnnnnnnnnnnnnnnnnnnnnnnnnnnnnnnnnnngtgggttttttgggttttgttttgtgtggggcccccccccccccccccctttttttttgcgctctactggatctttctacgctataccccagaacaatgccagttatggagttcaatttcagatttacggttcgatttgattttggtatatgtagatgatcgttctggtcatggctcgtggtgtagtcgttatatccatggaaggatgggtcgcttgttagtccgtgtgttggctaggtaaaggggcgacgggagaccgctgatcgcaatgccgcatcgacgtccgatactcggaaacccggtgcgcggccgaggattcggaggtttgcgagaagtactgggttcgtgtcagtgatattgaaaagacacagcaaacatatcgggtaactcacagtcaaagaaacactcaatgtccagagtatacgacgacgaggtcgaggatactgactccatattaccaggagagatcccaggcgaagcatagagactggaaacagtcgaccgatccggcgaaaagccatacaaagccccaaccagactctccggaacactgagcctcaatgccgacccatcaagcactacaccccgatgctctaaataaccctgcacatcatggcaatcaaaccacttcccgtccagatccaacgagcgaatcctctcctcctcactcatctgcaccacccctccccccaaagcaacagcaacaggctccctctccccactccaatcctcatcccaatcctggatcccgccccgctgcaaaatccgcaccatccgccgcaggattttcccaggtctccggctattctccgggtcgacggggttcccatccccgtccctgcgcgggaagtgcttccccgcgccgccgagccgccgagcgtgtagaacggcatcttggcgaattccagcacgctcccgatctcggattgcaccgtgcgtcggtaatggcggcggatgccggccatatcgtggatgcagggcacgagcccgaaaacgcgacttagcagcgcgggctcggtgcgcgggtctgttagccagcggtgagtgtgctccaggctgaatctgtgcaggcggcgggagaggttggattcttggtggctgtatgtgtagattgttgctgttgggaggatgcggtttattagtggggatggggagcgggctcggttgtatgctgggtatgaagagggggtgccggggctcttctggggacgtgtataagatagttcgtagccgaatatggccttgtctcttgatggagcgttagtttgctcgagttggagatcattgtcgttttcggatgtctgtcgggtcttgtttatttctgctagaatgagttctcgtgtgcgagcgagatagtccacgcttggctggagtgtcggttcttcgttgaggcgatcgactgcctcgtggtgggctccgcctaggagattggatacatcctctagtgtctgctctagtgcattgacgcgagatctgagagtctggatggtagtctcctttttgagacgataggtgcgttgtgcccgtcggatctgcagacggcgttcctgtggagctggtcaacggtgtctctatcgcaggcccattggatctacctcaatagcagtggcgtctttggcctgtgatcgcggccggcctctcttccgcacgggacgatccggaccagccgagattttatccgtcgcttggtcgggaatcttcggtggttgggctgctttcgttcggggtcttagccggctagacctggtgtttgttggagtttcctgttcttgtgacagttccaggtaggatcttgacgatagcgtgtccatcacgggtgcctatagttttgatttggaatatatctcgcagtcgaattgtccagatgatcagagaggaccgatatccaaaccctggatccagcctggaggttgacgttgattgcaattaattgatcactcatcctcgggaataacctcggccttaagccaacgctaatgcgcccacaggggttctccaccagccttgcagatatttgtttgcccatctccgacagagtgcaaagtaccctaaggctatgcacatcatctacagggatgttatgaaattatctcgagttgtgcacgtcgtcgacgtcacacggaaacccgttattttatttcgacacacagacctccatcgcttctcccggaccgcataacgtccggtgatacagtcagactccagaggaacctgaaatccgcggattttccttagggcctttccggtaacagtggagaataacacggtgactacaaggaccaaagacacaggtagcagctccgagatccagatcgtgctgaaattgtcagcgtggcgatcgaaaatgacatccaccacaactgcgattggctcttgacctttagctttgtgacgatcatgtcttattcttgccccggagggttttcctcatttatgcttcgacccgaggccgtgggattattataaaaccacttgatttctgcctggaacacctctgaaaatttctttcaaaccaaggccatggctctgtcgtttgtcttgggctttgcggccgcagccgttgtgctgcaggtcatccgcatggtattcaactcatggcagcactcacgacatgctaagagcttgggttgtggcagtgtgccaatgttcccgtctaaagatccttttggaatcgataacctgaaacagtccctggtagcagacaaggccaaagtagtacctcagttgtccgaggagcgggtcaagatcattagtgatcaggagaaacgcgatgtcactacattctccatctgcaacctcggtcgcacccacatctttactatcgaccctaagaacatccaggctgttctggctacacagttcaaggacttcgagcttggttctgtccgtcgaattagcttgcatccgctactgggaagtggtattgtgagtacctgctgtacctcatttatcctatctgcaacccgtattgactgtctatagttcaccgccgatggagaggaatggagccgatcccgtagcctacttcgacctcagttcacccgcgagcagatcagtcaattggacttggaagaggagcatgtgcaaaaggccatgcaggctctgtccgtcgcggacaacggatggaccgccgctaccgacatccagactatcttcttccgcctgaccatcgactccgccacagaattcctattcggcgaaagtgtcgagagccagctcggcgctctaaacggcctgaacagacccgaagactccttcgccagctacttcgacaagtcccaatgggtctgcgcgcagcgaagccgcttcgagaaacttgccttcctcgccgagaacaaagaaaccaggttctccgacaagcaagtgcactccttcgtcgacaaagtcgtctcaaacgccctggcagcctcccaagccgaaaagaacgcctcccccgagaaatcctcctacgtcttcctcgaagccctcctagaagtaacccgcgatccaatcgagctccgctcccaactccttaacatcctccttgccggccgcgacacaaccgcctcccttctaagctggacaaccctcatgctagcccaccacccagaggtcttctccaaactccgcgaaaccatcatctccaacttcggcacctactccaacccccagaacatcaccttcgccaacctgaaatcctgccagtacctgcagcacgtgatgaacgaagtgctacgcctgtaccccgtcgtccccttcaaccgccgcaacgcagtccgcgacacgaccatcccgcgcggcggcggtccgaacggccaggaccccgtgtacatccgcaagggccagtcggtgatctactcgacgcatgttatgcagcgccgtaaggacctgtggggccctgacgccgacgagttcaagcctgatcgctgggtaagccgccggcctgggtgggagtatatcccgttcaatggtgggccgcggatctgtattgggcagcagtttgcgctgactgaggctgggtatgttattgtgaggcttttgcagcgctttgatcgtattgagaatgtttatcccgatcagaagattcgctatggtcttactttgactagtgcgcctgctgatctggttactgtgcgcttgcaccaggctgaggatgcttgaggggatgttggttcgttgcctttttatctgtccctatggtatttttcttttcttcgtttctagggatggttgatggtgcttgtgttttctttctgcggttatttggtctagttgggttttgccggctaagactgagatcggcttgaaaatttgtatatatctcttccacactggctgagtcactctgagcggtttgtgcctatatgacgagaatgacatatttgcctaggtatgaatatagttcttattattttgaattgtgtttcctgttgcgtgtaatatgaggaaacaattggcactgggaagttcatcaaatcagatgcaaggttgatcttagcactgaccgcaagtaaagcaggttctatacctaggtataggaagaacacacacagtatttcaacacatcagaattgaatttagataataagatcgaagtaaatcgagaagaaagtaatgtaataaaatacatggagtatgaataacagtcaaccccgcaagaaaacgcttacaccaaaccaccagtcaaaaaatctccccttttggcttgatccacacgagatcatcccttaaagacactgggaatagtaagggttctgcttgacgcaagtggtgccgctctcgcaagcagtggcgccggtccagttgatgccaccgcactggtaatagtgcttagcaatgttcacagtagaggagccgctggtaggtacctgagcatatgccgtagcggtcgtggtggaggtggcggcggtggtggtcgaggtcacggtggaggtgagggtgacgagggtggacgggacgacaaccgtggtggtggtcgtgggagctgacgctgcgggagctgtggtggtcgaggaagacgaggtcaccgaggtggggacctgggcggcagcggtagtggtgctggacgtctgggcagcggtggtggtggatgtctgaacggcgttcttggtggatgtagatgtctgcgcagtggtagtagcggatgtctgagcggcggtcttagtagaggatgtctgggcagcggtggtggaggtggatgaagaagaggaagacgaggaggtcacggctgaggcagtgccgtccacgaagtacttctcgaggatgggcaggtaagtcgcgtaagcagggccattgctgggctccaagttgtacatgtaagatccccaccagggaccggcagaccaccacgaggcgccgacccagacgtcgctgttgtcggacatgtaggagagcatgccctcgacggcagtctcgcagtcgctgttgacgccaccggcgaactcgccgataaagcccttcttgttgttgtcctgcaaccaggtggtggcggactcgagacgctccttaccgatggtggtgctgacacaggtctcggaggtaccggagctgtcgctgtccaggtactggtgcatctcgtagacgatcttgtccgcggagtcggtaagggccttcaggttgtcgttggtggcgacccaggaataggcgccgctccatgcgttaccttcaacgaagatgtactggctggtggcaccagcggcacggatagcgttaatagcggcctggttcaggtccagaacgagagtctgatcaaggccgtggtactcgttgtctaaatgatattagtggattattaccatggtatgggtgcctctaggtgacttactggtatcgaagatgaccttctcgttagtggcgaactcagcagcaacggtcttccagaaggcgccgaaatcagaggtcgaggtgatgatattgccagagctgtaaatgagcaattagtatcatacatcacggtgggttctagtttgatacacttactatcttccgtagttgtgggggtcaatgatggcataggcaccgctgtcggtaatgaactggacagtctacataatagaactgttagatctggaagagaatcaactacgacagacatcacgtacagtcttaagagcggccaggtaagtagcatccgcggtgccggtcatgctggatggcaccaggcgctccatcaagaagggcacacggaagatgttcatgcccgcatctcgcaggatctgaatctgatcagtcttgggccaggtgtagtctgtgttcagagtaccggggatgctgcccgaggcaaattcagcaccggactcgttcacgccgacccaagtgaatccattggcgcgcttcttgatattagcgctctgcctggtaggaacaacgtctcttgttcgggggtatgcgcaggccacagttgcggcgctggcagccaggacaatgttagtgaacttcattgtaggttgggaaatgtaaaagagagtgagtgtcgagtttgacggtaaagaatgtgaatagaagtaaaagaatgaaaatcaagagaccagtcttgaagcttgaatgaaagataatgaatgtactgcacgaagcaagggtgaaactcgtgggggtcgtctgttatatagccataacctgctcgggggcgtcaaatggcgctttgtgtacaaagatactaacaggcattctagagtggattcattcttcggcttaattagaccgtgataccggaagcgctaaccctgagggctgcaggagatgtctgttctgaacggcgggtctctccaccaaagtggccggataatttctcagaagccactagttcgagcacaagggaccaggagcgatccataaggcatttcgatgttatccataatcaacccaatctgtcgggaattggcaggcaacgcctaaccgcataggattgcacggagtatgtggaggcgggatcactaaagggcgcaaagtcggatcggcttccatttcgcttagactcgtctccccctcgaaagagagtgcaattaaaacgagacagttctgatacacttccggattagctaacccgccttgagcgtagtggcggaaaataaggcgccggataaaatgagggctgcctcaagatgaaacagacaccatgtggtaatttgggttgaccctgagatccccggtataatttgcccggaagctccttagcggagaggctaagaagcgaagctcatatatcgaagcgagactatccacatttcggtagtcgcggacacgactacccggacaagatatgttggtgttgtatgttgtatgttgtgttgtctgctcactcctgtcgatgctaatataaccgtcgtcacgtagtactataactagcttttcaaccgtactttgcagccgcctctaatctcttatggtttagacttggatgcaaataaattagacctgatgttccaatttattttctaattcatcaggaaagttacaggagttatgctcttttgtgaccagcagtgccggcagtatataaggggtacccttggcgaaaaccaactgtacatgttaagatgagatcgatcgtcgagaacgtttcatacttcgatccaattgatagaaatcgagtgaattgtaccatttcatctccgtgcacgtatctcaggcaaaaaagggtcccaaatatgtcagtagaaacaacatataaagtagtcaatgtataaaaaggcagggacaatgtattgatctttaatgctctatttgactgctatctttttttccctctcctatgaaacgagagggtacaaagtcagaggctatcaagaggagccctacgattcgaaatgttcgcgttacatgggattcgaacaccaacacgtgggcacgtgacttcccaaaagcgtaattctacgagagaatggtagaaacgcgcgcaccctgtagccctaataaaggatctgtaaaagaaaaaaaaaataggtagcttctctttgattgagcgtgtcatccttagtgcaggggccatgctaatcttctctgtatattttcatttgaccatatgccccgaagggcgaatagatatccttaaagttcaatataacctccattttgggcaaaaaactaccgcctacttattttgtcaaagcatcctacaggctttgattggatggctacaggtggcttgtcacgtgaaatggtaggctcggattgcatccattagttaatgagttaagtgattaccgatgagttatgaggtctaagcatgtccccaagcatagacgaagctactctgtgatgttaaattcaaatgaataatcaccttgaccgatcggcacaggcttcgcgtcattgtcatacagcgtcctttcaaaatatcgcacccgtccatccggtcgtgccaggagaacagtttgtttctgtgtcccgtatgaaccacaggtaaaactctggttcggggccccatttgccggggtgtagatctcatcctgtacctgcgctgcagcgatatcctctgcatcttgatcaggatcatttggagtaccgatgcgcggaacgaagatggtcttgtgcagatgttgaatgtatgtctcaattgtggcctccttctctggcagtcgtggcaggcgatcagtgctgaggacctgcagcagacgatcaatcaatgcatcctcgtcctccgcgtctcccttttgcacatgctcattaatagcagcctccatcaactgctctccattaataatcttgggccaggatctgtcatcaaagcttgtgttgctgagcccacgtgtctggttcttctccgttgccacccaagtgatctgatccatgtctgtggaacggttggagacaatggccaagggctcgttgatacgtccacacaccagactgaacccccccacctgtcttacttctgggttggccacgatgctttgcacaaactcttcggtatcatcccgcttgtcggtggacccgatcaaccagttgttgacgatggcgccccggctgtagattccgatggctgcgctggtggagtcctcacggtagttggtaagaactgccacctttccctgcctggtgacccccatccaagtgccttgtgtaggtcgggctaggtctcgtgagccgaggacatgtgaggatggccttagccaccagcctggcgaagatgttggacgatggaggaattcctatatatggtaagcttgtggttcaccgcttagagtggcaatacttacatctctgttgttgattatgatcaacgagtatttcgggtgggaagttgagattaatgcgatacacatagtttgagtttccgaggtcctagttgaacgggcggggaaaagaggattcacgaatttaacaacggtgtgtataagatggagtagaagcaaaggttctagcgaaacaggaaatcctggaagagaaagaggaacgggccataacacgtaggaactaaggcatctcgggtgattgggccactcgttgcttgtgcctcgggcttgtccctcgtgtagcgtatgcacctaagtcttggagtcttaaaaagccctcaaatatggcaagatatatattgtctcaaaacacatgaatgactgaattattatggcacctcaaaagcaaaaagtgtttcgcgtgacgtcaacacacatccgttgattcttggggaaatgcaagcggtcacgtctgtcatggagttatcgtgaagtgatttgcgcgtactattaatatagttatagttatagttattcttctttgattctgctttcaagcatcggataccctaaattatctttgttgccttattctcctcttttttgtccgacttcaggcgttagtctcagatcagcggggctgaagacttaaatatccccagtgactttcttttttcacatcttcaattcacccaggcttcatcatgtttggaatctttgcggacttattgtcgtaagttcaaagcatatacctcggaaagaagagatccgtaagctaacgcatagctatctgatagctcggtcatcacgatcctcttccccgtctttgcttcctacaaggctctccgttcctctgacccctcgcaactcgcaccatggctgatgtactgggtggtgctctcagtcattctgctggctgaatcctggacattttttatcatcggatggtatagttcaaccccgctccggctcaagatcacaagctaatgactcaattatctaggttcccattctacagctggatccgcctcggtttcatgtcttatctcgttcttccccagacgcaaggggctcgcttactgtaccaagactacgtggatccgttcttgacacaccatgagcgggggatcgaagagatgatcggccgcacccatgagcgggccaaggcactgggtcttcaatacttctacaaggccatcgactttgtccggcagagggtcctgggtctacctccgcagcgcccgacaccccctcagccaggtgccgcttcctacgcgcagtcgctactatcgcggttcaacatccccgtcgcaggaggagctggggcgcccgccaacacaactgattggtactctcttttcagtgcggctgtgggctcagttaccactggcaagtctcgggaagtgcgggacgaggagctttccgccagtggcactctcctccagcgccagctgcagtctatgtctggaaccgagaaggctcaatttatttcctcgcagcgagaggtgctagattaccttcggtcaactctaacacaagaggagcagagcactcctcgtggtgggctcgaggctgatgaccttgcctatggcgtgccgttgcgcaagaatcgcagcgaaaactccttcgaggttgttgatgcggatctaggaagtcgcccggaacaaaagactagtggatggacatctggttggttcggcaacgagcaagattcctcgggctcatctggtactgacttcgctgcacgggctgtcgatgagattgcccgatcgcgcacaaccgggcacgaccgatcttgagagtctgaccgcggagaatgtcccgcttttcaacaggggtccagatagaataagaaaaccaaaatagaacttgaacactttgctcttgctgagagatagggatgggagacatgatagatgtttccgggttgttttctgccttgctaaaaaatagttgaattgaaacttgaatcgaaagctcaaataccactaagaacagccgaggatgtcaagccgaatccctccggtcggaggaatagccttgcatggaagagttcacgcagatgcactgcaaggacggggacggggagacggggaagtatttgatatatccctatgcttggtgtgttgagtcaggggtgcataggaataagataggagatctaataggatctgcgagatatacagagcatagtccgttatgtatctaaagtaccttgtatagttcgatgtagatgtacttcgtcgatgtagatataggatgggtcaatagtggcaaatggggcagatggggcagatgggggcatgtagagggtccagaggaagaaagaaacacccagagtcattcacgagaagagtcatgtctagtattgaaccctatagcccatatgatatgcgttgaggccgtgtagatactatctatactcatgtactaacccatgtagatctctttgtaacatgtgggtggcgttgtagacgttattctcgaccttttccacattgctctcacttttcttttgaacatttcatcaagaccttttttctagagattctcacgagaatccatcccataaaacacattcacatccaaaggtacgttggtcgagccgggacgcactctcgttctgccctttcgttttccacaaacccgaatatttttttcccgtgaattttttccctcccaccaaccttctaccctttgaaataaccctttaacacataacactgtcgaccaaaacgctgctcttgctgcgtacctggtcttctgtgtcactggaaactcgctttccttatttcaaatcaagtttcatccctttaacaacctgcagctaggtttggatgtggccttgttacgcctccgcgtactgacatcacctcgtctttttttctctctctcacctgcctccatcgcccttttcgccctctccgcgcgtttagacgtacaacctgtctaatgagctcgaaccctcctcagtcgggcaaccaaggacaaagcaccgctactcccgtcgcttcgacccagcccgcatcctctaaccccctggctgcccaggcgccagccagatcttacgccaacgcaactaagaagtccgcgacggactcaaccgccgtacccgtcaccgtgggcggttcagcgcaacatgggcagtcgagctccgtatctgtgaacggcaaacccatgcaaaagcaatctcaacagtctgcctcttctggcgtgaccatcgtcaatggagccccctctgcttcggctgcttcctccggggaccactctcgcaagccatctgtgaccatcacgtcgagcgggacctccggctacatgcccaacggcggtggcccggccagtcggcccaacagccttcagttcggattccagcagagttctcccaacatgggtgctcccgctgtgcccgcctccaaccagcaagctggacttggtgctccttccacaaacccgcggattacgtctcctcagacttctccctcgcctattccccagcccgcatccagcggcggccgcccacctccatcgacttaccaggcacaaggaaatgtgcccaacttcggtagcttcggagaatcggctgatgctaacgtaagtgtctctgctccttccctcttgagtgatcccggtgtacacagcgtgacaccacccgtgcgcgaccttttcaagtccttgttttcgtgttttcgacctggttttgctcacatagatgtgttcgatttcacaggcacacggtgctcagcacttgcgtcgcgagtcctcccaatccacccacagcgatatgagcaaccacatgggcaaccgctcaagctaccaaggcggtcgcggtcgcggatactcccagcccggctaccagggacagcagatgccctactcccctaaccccggtttccgacagacccccaatcagccgcgaggcggtcctaacatgggtccccagtttcacggctcgaaccagggccgtcctttggccccctacccgaactcgcctcaccaagccaaccgcagccctgccttggccaatgttaaccctaccactccccagatgaaccaggttccgatggcacacccccagatgcctcagcaaccgtatggttacggtcaacacatgggcccccaagctgtgagatcccccccttctcgttcttcccaggacccctggcgtcgtccccaaaggaacctttccagctcttggaggcgcaaagacaaccctacatactctcccgagtgccccgtggaccttgcgcctgaaagtggccagttcgaacagattctaacattggtcaaatttcaacagtcattccccaacacatacgatcccaactacgctggttactacaacccgaatggtggttactacatgggacccccgtccccccaacctcgtactgccggcatgccctacaatcctcagtacatgggacaacagttccctaaccccatgcctcaggcgacgccactttcgcgtaccccctctcaagtatctactgatcgtccaggttcgagcctcggtcagggaccggcagccactggccctgctgtcgccggccacacccacactggcagccgcgcatccaacagccccgctcccaagcctcacttcattattccctcggcgaagaagagcccaatcatcatcaaggaccctaacagtggctcagtcaagaccttcgaaaagaaccccgcctcccctgctcgtgccaccccttcgcccgtgaagctcactcctcctacatccaccccccctcctcgcactggcagcgcgtctgagcacactcgtaccgagaacaaggtgaagaccgatgaagagaagaagcaagagttgaaggatgccgttcgcctgaagatccagcaggacgaagctgctcaaaagcagcgtctggctgatgaggcttctcgcaagaccgctgaagctgcgccggctgctgccaagaaggatgatactgaatctgcccgggctgctattgaagatcttagcattaaagataaggccgctcccgtcgaggaacccaagaaggtggaggctgctacagaatcaaaggctgctgcccctgctgaagagcccaagaaggctcctgctcctgcccctgcccctgcccctgcccctgcccctgcggatgatgatgagatcgactttgatgccatcgagcgtgaaatggccgagattgaagccaaggagcgcgccgctgaggaagactacaaccgcgcaaagcaagctaaaaaggaagaagccgaacgcaaggagcgtgaggaacttgagaactacgaggccaacatgaagaaggctgaagctgaggccgaggctcgcgaggttgcccgcgagaacgccgcccgtgtcggtggtgaagcggccgccaaggaagacgccaaggatgcgtttgcctcgctcaagaagggtggctacactgccactgagtcttctacgcctgccgacagcggtgctgccactcctgtttcgtccgacatgggtccgccagccaagcctgccagtgctattcctaagaagcccgttggtctcaagcttgatacccccaagcccaccgagcccctgcaagcaaccgcaggcatgaagtctttgcagaatgccaagttcctgaaagacctcagcaagatcacttacccctcgtccatcacccctcccagcgccgctatgaacgctgctgcgcccgaaggccgcaagttccactacgaccgggacttcctgctgcaattccaggccgcctttaaggacaagatttccttagactgggacgcccgtctgcgggacacagtcggtgacccatctggatcccagtctgcccgcactcctggcttaggtagccgcggtccctctcgcaacggcaccatgggtcctactaccttccccgtcatgggcaacttcaacacaggccgacctggccagatgcccgctatgggcagcggatcactgaccggccgcagcgcgtccgcctttccatttggacggggcggcggtcctggtagcatggctattggaaacattcgccaaaactctgccggtgttcctcctcgtggcaactcaagcaagggtccccgcaacgacagccgacagaataagaataagcacggcggccgacaggatgaggcacaaaacaaatcgatgcctcttaccgctggcatggatctgaaggctattcaaaccaccgcgactggctggaagcctcgcagtgttggccaaaacgctggcgctggtcccgcccctggtggtgacggctacttggcaccggatgtcgtgcagcgcaaggtcaaggctgctcttaacaagatgaccccggagaagtttgaccgtatctctggtcagatcctcgagattgtttcccagtccaaggatgagtccgacggccgcaccctgcgccaggtcatccaactcacatttgagaaggctactgatgaggctcactgggctcccatgtacgccaagttctgtaagagcatgctggagagcatgagcccagaaattaaggatgagaacattcgtgacagaaatggcacagtcgttgctggtggaagtttgttccgcaagtacctgctcaaccgctgccaagaagagttcgagcgtggctggaagactaacctgcctaacaagcctgagggcactactgaagaggtatgtcgttctacatctcaacgttatttttcccgtatactaataaccgaccacaggttgcaatgatgtctgaagaatactacatcgctgccgccgctaagcgtcgtggtcttggtctcgtcaagttcattggtgaactttacaagcttggcatgcttacagagcgtatcatgcacgagtgtgttaagaagcttgtggactatgagggtattcccgatgaagctgaggtcgagagtttgaccagtctgctgcgcaccatcggtgccagcctcgatgcctctgagaagggtcctgccatgatggacgcctactttactcgtatcaacctgatggttgagacacctaatctgcccagccgtcttcgtttcatgcttctagtaagtttatctctatctcttcgtcttatgagggggaaatagaagactaacatggttcttaggatattattgatctgcgtgccgcacgctggaactctaaggatgccgataagggtcctcagaccattgttgagatccgtgaggctgtaagtaacctttattgctatgttccaatgtctctcgctaactcttgaaacaggctgcccgtgcccagcaagctgctgaagctgagcgccagcgccagtccagcaaccgtggaggcggtggccgcatccccatgggtcgcggtgacgcccgcggtttcggatacggaaaccaagcccctcctcccgattatgcctctagcaaggttggcaccgacgatctccgccgcctgcgttcgactcgcaacaccaaccagcctatgtcattcggtccatccagcctactcggctcgcgtaccaacagcggccgcaagaacctcggtcccggtggtagcctggtccgtggtagtgacgacagcgctgccagcagccgcaacggcactagcggcagcaagaaggaagacaactcttctatgaatgctttcaggtatgcaacccctaacccttccctgcaaaaatcctcatgctaataccctttccagtgcgcttgctgcccttgaagatcgggataacatggctacctcgccaccgtcaaaccctgcatccccgatgctcactaagtcgcagcccgcggcagcggagcgtcgtccctcaaaaaccccgtctgtcaaggacggagaatccacagcatagagagtccttaggagttaatgatcaacgctttccattttcttggttcacaaaaagatttcctcattttcgtcatgtccatcttgttctttccccgtgagggaagccatgcgcctttgttcttaatcggtcacagtcctcgctttgcattttccgactggtcggttatcccctaggacttgtttttcacgctttatcacggccggtttttacttttttgaacttctttcgaaaaagagacccaattcatagtgtacaatcttgacatctttttcaattcttattcttgtttcttattcttgctttctccttcttttctttccattgaatcgagagatgggtgtggtccgtggggctgtgcttgagagtaggactttgctttgcaattggacttgctcaatcacttctatttcataattcttgtctttcttttgttccccatatgcaactcgcgtaggggtgggaactgacaagagattgatgatgacagtgatgaaggggttgctgtgttgctctcttttcctcttcctcctttcttgtgctttgcatattctcttcgctcttgttatttgctcttgcactttgcttgtccttgtcctcgtccttttttcccaatacccggagctccactcaactttagtgtaattgaatgaatgcttcgccttctggctctttctaatctcttcctttatgactattgagctactcgtagagttctgtattagacgtgactatagacttggaattttcaacaaacaatatagcatggatcggtgcctatacttacttgggtatactacgatgagaatagtcggccgcttatgttgttggtgtctttatgtctttatcaacaattctcccgtgttggtattgtagaaggataagaagaagaatcatccgcaaagaatagaatatccgcagtgaacaaagtgtaaagtatgaatattgactacgagtacacaggtagtttacaagaaatctgcacatctatgggattaagcaatcaatgtctatgcatccatttagcgaattcaggctgtaggcacaagagggagagaaatccacatggccagaacatgtgccctgtctaaccaggtcggaacatatcttaaaaaccataagtgatgagggtattgagctgaggtataactgtcagtcccgtcgcgagccgacgtggttcctgacgttcattattctgttcgagagagaggcgctagaagtagcaagggatggttcgtatgcatcgtgggtatctgagaaagcgcgatgatgtaatgtatggcgccaacacgagcgaaatgggagaaatggggataaagagccgccgcggagcaagcaatgctgtcaggattcagatcccttcttgttgtcgtcttcatcgttgttctctgacacttcaatcatcgggattgacacgggattcttgcttgaatcggaaggctcatcctcctctggcttgtcagcctcgggagcggggtctggcacaggagactcgagttgatcggatggagtaggtgaggccacggtgctctctagcaaaggagatggctgggcactactgccagcaatgacgctctcctgggagctatctgctgaacttgcaacacccggactcgccataaccactgcatccagtgagttccgaataggataagttgagtcggagtcatcgtggctaacgctactacggtctgagaccgacaaagaactgcgcgaggccgtattcgagtatgatgcagggagtccgagtgcctctgccactgctgcctcctcgtctggcagcttcgaagtgctgctatcgttgctagcactggcgccgaatatctgactgccgcgctgttcgctcatttccaggatatggttgtagctgcgtcgtgttgggtctgcacggcgctttttcttcttcttttcgcgcttcgttgaaggccgaacgactatcaccgggatgggggattgctggagacagtatttggagacggagcctgggagcagactgtgcactcctttcaagttgcgtcctcgtgtaccgacgacaagcattgcaggctcgtatatgcggatctagagattgttagattgttaggaggcaacaacggggttcttggaagcttaccatgcgttggaggatgctctcaaccttgcccacggcaagttccaggaccaaactgatggccttctcattctggctgttcttccgaatcacctgctcaaatagcttctcggcctcttcgcggtactttcgctcttcaattccagcgtcgctggctatgctcgagtccttctccaccgcccgaagacagacgatctcgtcgccgtcatccaccagctcgtcaatgagccattcgagggcgaactcggagtagtcgttctggtccgttccgcacaaaaaggtcctgctacgacgcgtgcactggtagcctttgtgtttatagtttaatgtgagggagaaatcggtcgcatcgaaattgtcgaacgtgtcaaaagagacgcctcgctcgtaggttctgccatacattagtacaggccatttcagtgtctttgaggggagcatacttcggtggcggtggagacggccctcgattcaattgggcagctttatgttcgcgttccttttcctccaatagttccctcgacggggtatccccgtatgacagtcgcttctccttgaagctcgatgggcgactaggcaactgagcctctgcaatgctaaactggatcgatctccgttggttcttgggcttatcctcactagagaggccacgggtgtgaccagacccagctgagatcgtatgatctccgagttcaggtcgctctacagactcagatgagactgtaggagaagttggcgcagacatcaggaagttgatctttggtgatgtaaaggaacaggggtataataggtctgtctattggtttgcgtgggtcgtgtgttgacgtaaatgacgaaagaccagtacgtatcagcggccgcgcggttgttgggggttccacaggaccaagcagggttttgggatcatgttttggagttcttgcaatataaattaggaaggttgatcatcacgagtcatcgtgctcgcgcggaatgacggatgcagcgaggggtcaaccgtcagggcggttcagggcggtgatcatttatcgatagcgggagccctgcccgcgagcttcattgtgcttatgtaatgccagcttgggtccacacaggcacgtgtccacgggtccggtgattgacataaccctataatgactgaagcttcatttgtgttaactacgtggggatgccaaagaggcgatatttagtgcccagtatttctttccaaagcctcagctgtcgagtagagcttgaagaaaacttgtccacgtgtttataaagggaaattctcaatcgcggcagctttaacaatctgtatgattctcagctgttttacgattggagatgatttctgggggttttgactcttgtgacatgatgagcgtgccatgaacctttttgctttctttttttcttcagagctaaggttgtttcacatgagaaagggatggccgcaacacaaacaaagaccaatggttcgttatatcattgggaagcatgataaagttcagagttgaagtgagcaatatatgtagctgaatgatctaaataatccgaactacaatggtatcaatctaattttccgtgctccgtacaaagaccagatctgttagggcataaagataaaggaccaacctactatattaagtaaattccatagcaatcatactccatacgtgatataccccattcccgccacccgtagacttccaaggtcctgatacgaaagctgactaatttcaatctcagggtcttaccagcacctaaactgccagataacggaaagtgctgccagataggggaagaagatctattgagcgcccaaccaataaaagcgcccaacagcggagcatacccgaaacacccccagcctcaagattcccacccactagcccaatctgactccccctgccttacctctaacaaagccaagggacccattcgaagcaaaaagaagcgatggaaaaaaaaaaacgagacaagacccagccccttcgtaacccactcccgtggagaacatggcctgaataatgagctagtaaaatccttcagctgactagcaacctgtcgcagcgccctatgccgacctagccgcgatgatctcacgtcttggctctgatctatctctcttatccggcggtgaagatcatggcgtgctggccggctgccacttctatttggctggaaacggattcggcgcgctcggggcgtggatcgacgtggtcacatgcgcgattctgccggttttggggatttgctgtgctacgacgaaggtacgcaatatggagattaagggagtacgtggaactggtacgtggaaaatgttgaggattttggaatttttattggattattttttttttttttgtgggggaagtgaagacacttggtttgtgtgtacattggttgggctcacaatggcttcccccgtgtttcaacgatccaatgcagtctcgacctttccagggagagctggaggttgggccactatcacagatagctggggatgtaagaaaaatataataaatgtccatgtgacatacaatgagatgtccaaagatggagattcgccaaaacgcgaccgacagaaaacgccagaaaatagaaaatagatgagatgtcaattataaattcgctccaaaaagtatcgtcatagaaagcatcagggtatcacgtatgtatcgctggatgatggtacacaaggcagagagaggggtagagatgagagtataagtcggggtcgtaacggagtggatatatgagggatcgagcttattcaataagcctcgatgatggtctgctcttgtgcaccaaaataccccccctgctcaaagagatggggttgatcggaattcgccaaggtaatagccgtagtagtaggctccttttcatgaaacgactccagcgtcggctggnnnnnnnnnnnnnnnnnnnnnnnnnnnnnnnnnnnnnnnnnnnnnnnnnnnnnnnnnnnnnnnnnnnnnnnnnnnnnnnnnnnnnnnnnnnnnnnnnnnnnnnnnnnnnnnnnnnnnnnnnnnnnnnnnnnnnnnnnnnnnnnnnnnnnnnnnnnnnnnnnnnnnnnnnnnnnnnnnnnnnnnnnnnnnnnnnnnnnnnnngcgggcgggggcggggaaggcggcgtcgcctcgtcctcggagtctccatccaagtcaacgaggagctcgggtggtgactgtcgggatgacgagcgagtcaagctcagctcgtccgaatcatctgcttcgtcgtactcaaagtctgagtctgtgtcatcgtcgtcgtcatcctcctctaggaggtcctcgaagtgagccacgggcgatggggcgcggcggcggggaggagtgttgatgatgaactcggactcgtcgtagtcggagtcgtcgctgagttcagagtccacatcggacgcatcctccggatcccagtcctcctcgggctcttcgaccacggtcgaggcccactggacatgttgccgagaggaaggagcaggggcagaagccttggtggctccgttgacggtctggttgaaccagcgttcttgttcacgctcagcgtcggcgagatcgtacattagtgagtcgaggaggttggcgtggccgacaagcagacgcaggtcgtggtccgcccgggaagcttcacgggtgagcttcttccgggcggtgtgagcaaggtagtatgtttgagtgatgctcattttcttatcttgacggcgacggaggagagaatcgaagtagggtgaggattcggaggatgggctgggggatttggaggtagaagaagagtccatggtgggccagacgagctttttcagggatattgggtatgactctttggtggtgactcaattaggcgtcatccagtcacagtggatcgttttgaggcggtgtgatataagggagaaagtcggtgttagattggattcggtatacatgaaagtatagacaggtcgagttgtgatttccaagggggaccagatcgatagtgtagcgggtttaaaaagggaatctcagatatcagaaacacctggacaagaggtttatatttaatctgacaaggcagcgttttctttttttcttttatttttttttagtccgatcgacccgatcgacccgaaacggactttacggatgacgagagatccaccggaaataaatggagaaaaggtatacgccgagcccgagtaaatgagtaatgcactggtcgcttccaaggttccctgggatttctagatcctcaccgctacgttacactttgtacgtatactttagatattgacagtaaatattgattagtattccgtgcttataattcaattcaaatctaattaactacgaaagttaatacagtgagtcatctaaagcggcactcggatggccaatacgccgttctggtccgcatcggaggatgaaaaaaccgatcggagtttcggtcgcacgtctgccgtttatttgatttgaattcttttccttaattcctaattcctaattcctaattccattatttcctattcgggctatatgtacctctgcgacctagtttaccaggtactctgttgattactgatataacaacaaggttcccatgatccttggaactcatatttgtattacagagcattcgatttctaatcctagcacgccaaatcatatcatcttcgatacgatctgacaattgctgacaattgctttgaccccgcgacgtgtcaacatcctatctagcatggaggctcttggaaccttggaagccaagccacattgctccgtatgcgtatcctgtgttatgcaacactacccctcgcctgtgttctgtccccctagacgagtacgacatgtgcccagccttggcaggatggagtagcattccccaggaattcgtgattgaccaggaatccatgtccgaggaggtacggagtacggagtagggctgtggggaacacacaggaggttctgactaatgattggcaagaattggcgcatctcattggtccccacacgaaatctgctcaccctgcgccctgcaaggagggggtgagattaggtgtttctcgcctcgcgatacaggcacaatgtacattccttactccgtccagcatacttggccctcatagcgtgtttggcgtatcgcacagactccaaccctgccaaggtaaggccctgtttttcagatggcagccttgggcttgtccaggcaggcgatcttggcggcttaggtaagatccatgcggatatcaccgagccaagatccgaatccacggatgcggctttctgatgacataagcactcaaatgccacctggcctggtggttcgctcgcagagcttacccttttaatctccacttgatatagccctacggactagccgaatacgaagatcccaatacatattgatctggcctgattgtttcattttaactctaggctgctcttatgtcttaggctaccatatcatgcaatcttttctcgattttccatcaatatcaatctactctgaaaattacccaattaggaaatggtgaggtcaacaggtcgatccagccacaggccagaacaattcaattcaaggtctatgttgtggggatggatcggagatcaatacaatagtcatcatcatacttttacttttattgaaacgccaataatcgacagcggatcctcggctttttgttgattctccgagatccactgtgcttgacgagtatcagagtatgacatcaaggacttgggcttcggcaatttcttatctgttatttattgccgagagatgattctttgatgtgtattagaagtggattgccaattgtctaggcagttgatatggttgagatggttgagatgatgtggacgacaacacattacatgtacaacggcctgatataatagtcaccaatcaaagtctagataaccacctgcctaaaataggtgacgtgtatcttgcggctgataatgatatgcataacatacgtgtgtatgcacataatctcatcttaataaccaattcacaatttatgcacacaatctccattaataaccagtgcataaacataaaattatcccacctaattaggtaatgtccctcgcaagcccctccaaggctggaggcgaccaaattcctccgatcctcggcaaaactccatccgcccaggcaaactccgtatccgagttccgtcccaggggtggatcgtgcactgtgcacaccttctataacatgcttccccaatgcacgtcgccagttcacgctagagctctctggctttgctcacgtcggctatcaccttcattcacgggtgatcgacacgtgcaaaagacgcatgtgactcgatctcgggactccgttgccggtgccggaatggatcttcgtccaccgctagatcgaggtttgctggctatacggcacatggccacggggctggccggatggaatggtccgtgtggattcactacattttgtacggagtaactagctaactagaggtcctcgcctcgtgactcatggctttttttttcttctagtccgtcatgcaggtcgcttagcgtgttcctcgctgccatggggattctcgtttaagggtccattcgagctgagctgtcggccgctcggatatagctcgggctttgttagttagttatttaattaatcatttatgattgtgcgctctgatcatcttcagcttgtaagcacgtgaattctagaacaaaaaaacacatacatgtccggaaaaggaataggatagcgaggtgggtaaggccaaagtcagggaaacaaattttcagggcgagatggacgctttgatcaatctctggcctctttgtgcctgtggagacacccgtttatcctttgatgtagggcagtcatggcacgtgacagcgatctatatctacatagccaggtcctacgtgaacatgaataccataggtatacagattacagagcactaaagtagaagaaaaacattcattcgtgagaactgacgaataggtgatagtcaagtgacgcctaagcaacgcctaagcgtcgcttcagcaacgactggacgagacatccagcgctgcttcggcgacgcttagacgccgcttaggcgccacaggccacagactcgagccggactcgaaccggactccagcgagccccagcgcttgcacattcaacagcaaggcgcatcccaccctcgccttcaagccttccaggcttctcactccaggtacacattctggaccatctcattgccgagatgatcgataacagagaccgaattgacggggtccatgatccggagatcagcataagcgagggcccggtcaacggtggcgtcaacgttgtacaagtcgctggcgtagccatggaagcgaagcttgtgaatagcggccttgatccaggtgacgcagttctggacaggctcagcccccttaatgggcagggggacagaacgaagaaggatcttgatggagtcggggccgactccatcgttgacctcgccgattgccatgcggatcaggagagagtcgcaggaggccgggtgaacgttgttcttgacgcggtaggtccattggtaatcggggttgaggtcgcgtcggtacactgggtcgggcgaggctccgtcagtcacgtcgaaggcgtagtagcggttgtttggtgcatcgaagaggaggatggcccagtggtaagcagagaagcctaggcgtcgtcggtattcgccaagagagagctcgcctcggtggtagactgccaggaagacttggtagactctggtacctgggggactcagaatcgcgccacgctcgacgggagcatcgctgaactatgtgggtgctcttgttagttgctattctgagcttcagttttgatggatcagactcacaggaagttcaattggaaacattgccatgttgctcagaatttgcacggttgtgtgggatgggagatggatgagggtttgtttactggcttttctcaggtcgagcacttgagcgggcacatgagcgagcacctgagcaggaacccctctcagcttttatttccctttctggctaccgcctgaatgccattgtcaattgcaattgaatcgtcggtgcctaaccaagatgtctatctgagaccgccagcctattgatgattgtggcgaccagaaacggggatttattcgattttatatcgcgggtttatagatatctgaagctatacaaatgccggcgcacggaccatccgatatagatcgaagcggcccgtccccttcgatccaaccataaaagaccgaagctacgaatagtaaattagaccaatttggtagtttgattgattaaaacaaatgagcgacatgtaaaatagttatgtttcaatctaaaatgcgcactagctctaggtatgtggtggataggaccatggtctgatatttgcgacaccctggcacaaacatacaatcacactttgggattgtataaatgctggcaactctggttattgaaaagaagataatcacttgtattctttcaaatgttctaaaaccatgcatatagtgaacgagcgacacacaatccttttgtgaatatcctaggtgaccaaaacacagatagaagttggctgaatatattctcatgtcgtagaacagtaacctatgtacattggtctattttttaaattcaataataggaatgcgataagactttctttcagaattaaggtaactttctcgataagacatgggccagtctcgggctacatatagaaaagtcgctggtccttcctatacatctaaaagacatctcgagagaatatccgaaaacacatcgaagtgtttttacacatatataggagatacctaggtcgctgagctgtacaaacaatctgctcaaccatctcattgatatagacataaagagcaaaaataacaaaagagtagtctggacatagaatcatagagaaatcccaatgtcacgcctgcctgaaataacttggtacttgatgtcaaagtgatcagtacccggttttcaaatctgttaaacagactctgcccttatccacctaaggcagagacaagaacaaattcttcaacttgggatagttaggtgtgcccaatccagtaacgggatcccatctgcatagtacgtcagtaaaaagcccacagccaatatataatattgtactcaccctggaatagcgctgaagccgtccgagtcacatccagcactggtgccgttggtgatatcgttaagaacctccgggtgagcatagagcacggggttcacgaaaccaacagggcgcttgcccctggcaagccgttcttcgttgatctaccaagagcagatccattagcacagtcgaaaaacaaattcaaattcccgacttaccaaattcagaaccgaagcgaacaatggcgacgccaaactagcgccatagaagtggtgcagcgctccattggtgtaagcagggaacaaggcaccattggccgacacatcgggataagcacggccaatacggttgtagagacccttggtcttgttaaggttgacttcgaactcggaatagtaggggtaagtcagcttggccttcttgaagtacttctccacggctttcctctggtacaaaggctgcgggaagtagttggagaagccgcccgagctgctgaagttggcggcggtaccacccaagttagcgtgcatcacgctttcggcatcgttgacggtctggtccgcgtagagcatggtgcctccgacggaggtcacgtaggggcagttggaggggtattgggggttgaagatctttccctcgggtcccaggcatccgttggcacttccgtcgccgtggaaggaggcgactccgtagtcgccagaggcgaataggatggagtggccctgcaggccgagcttcaggaactcattgcattggcgcttggtgtatgcgacggggagatcggcttcggcttgtccgtaggaggcgctgatgacgtttgtgggcttgtacacaccgcattgaagcttgcctgtcttgtgtgagccatcagatcagtccgtttggtggaaattgtatattacccttgtagccaccaggttggggattgggatagactgcgtcgatatcagggttgtcgcccttttcaccgaaggcactgtatgtgcagtaagactgaaattattagcaatatgcatttatcttcagcagaatatgacatacaccatcgagagcgtcaaggaaagtgttgaacaggttggtggtcgcaacctcttgcggttcatagatttggtcatcaacctggtaaagagtcacggactgggggtagataagggcataactggcgatattagcaaataacagagaagcaagtagaaaagaactgtacttacgccatgtcaatatcaatatccgattcaccagtattcagcgggctgtaatcaggcaccgagaagttggcaccatcaatcaaggcaggaatggggtaagtgccttgagggatccaaggagcataggctttgtagtacagatcaatatctgacttggcaaagtagtcaccctgctcgtagagaccaagcgagttgcccttctttgccttggtggcatttggaatcttgtacaaggccttgatgcaggccggagtcatgttggttccgcatgtctggagatccgcaggaagtgacttcgccttctcgggaataaccgtgttgatagagtcatcaattcccacgggcgtgcccttggaatgaaccaaatgcgacgctcgcttctccttagtggtcttcttgacgatggggctgagcttgacacccggagtaatatagtcaatgtgtgcctggatatgttcagggacgtggtacctaacactgttaaaagagtccaagatggtcagaagcagcaaaactcactcctcacagccaatcttgatgctggaactgctggcatgctcatgttcatagaactcagccttgaacagatcctccacttcatgcgcataggcatcaaaagccaaccatcccttgttatcggagtgtacaatccgggactcatgaatcccagaagcttcaagccagtgacgaacagattccacagaatcctttgaaggcgcaaacaaaccatgaacttcctccgcagtccaatactgtccatatttgggggagctggggtcagaactatacaaatattagtgattaggatgtacaccatgaggacaagacacataaaacaacttacacagccatgagatactcatcacccttctccaaattattctgggtaagaccaatgcgcacaggcagcacagaatcacgcttaatgcgctcgcccttcacccaatccaaatgctcgcttcgcttctcatgcaagacatgcttcaccggtgctgggacggctccagaaagagccgcgatcgccagagcgacacaaacttggcgtacgagcatcttgaggaacaatggagctgtggtgatactcggctatctgggatggggagtttccccctgatatatagtacacacgggacagctaatcgcaatgttgtgattgcaaccctaatttccggactgcgatggcgaaaaaagcactaattaagattggcagatctgattggatatatcctctagtagctgcatgaagtttgagacaaaatccggaattcaaccggcactagagatcaatgcccctggcataacgacttcgatatctctgcgcgggatagcttaagagcgcaggtggtaatttatagctcttattctgccaatttctgatattattacttggtatttcttggtagtttcttggtgattccttagttattgcttggtcattgcttggtgtttttgtcttatctcaagaggggtgctaggctagttcgatgagaacggacgctacagcggagttccgacggagaaatccatcgatgtagcaacgattcatttggggctgaacctggcgagaagtcagagatccaatgggagaatatgtaaagtcgttcagaatttaggattcttcgtgaaaaagaaaacaacctcgattccgggcgtcaaaccatgcgacacgggccggggtcttagagtcgaaggaacttctcaggagttattgtaactgactactatgtgccatctgtattcaaaatatgtgtataaatttatctaaatcaaaaggaaaaacctgacatcatcatcatatcgaatatcaatcacagtggagaccacaagacggcgtctttttttttacgaggagaaaaaggaaaggggaatagagggggaaagacactagaaaaatctagtggtggaagagacggatgccctgctcgacgaaggtgatgcccagcttctcggcagtctcgaagacaggggtgtcgttctggctaccagtgggggcggcgatgtacttgacccctgagcgggcggcacggaagacattgtcgatgaaggggaactagtgatgacaattagcatttacgaaagagtgtgggcggacaaggggattacgtacgaaggcatcggacgagacagcgacctcgctgagcttctggagccaagcctcacgctcctcctgggtgaagggagcagggacttcctcgaagacacgctcgtactcggcggtctcggcctcggtgcggggggtctggcccgagcagagcaggtcaatggcgttggacttgtcagcacgcttggtgccctgcttccacttgataccgatgacgcgctcgtggaagcgcatccaccagttgtcggccttgtcgccggccagacgggtgcagtggatacggctctgctggccagcgcccaggccgatgatctggccgttcagggcgtagcagacggagttggactgggtgtacttgagggcaatggtggcgacggtcaagtcacggagagcagcctcggggagggaggtggtggtcttgggggtgatgatggtgttgaaggtcttgctgggggagatgacgacgtcgttgcgctgctgggtcaggtggacaccgtaaatagtgcgggtctcctcaggtgccggggtgtagtcctcgtccatctggaggacgaggtacttgccgcccttcttcttggagaggatggccagagcctcgggctggtagccgggagcgatgacaccgtcagacacctcacgcgagatgatcctggcggtagggacatcgacgatgtcactgagggcgagaaggtcaccgaagctggacatgcggtcggcaccacgggcacgagcgtaagcctgagccagaccggaggtctcgatatcctggatatcgtccaccatgtagaccttgcgctccttctcgttcaggggcacgccgatagcggcaccagcgggggaaacgtgcttgaagctggcagcggcggggaagccaagagcttgcttgagctccttaaccaaaggccaggcgttcagggcatcgagcaggttaacgtagccaggagctccattgaggaccttgaaaggtagctggccctgaaccatgtaggcagaggcgggcttctgatgggggttgataccgtagcgcagcgacagctgctgcgcaccgttgccagcatactccttgcggaaaaagcctgagatagcggtgtcataatcggcagtctgctcgaacgccttgagggcgtactgcttgcggctagcctcggtgatagcgccggcctcgagctccttgaggaaatcggagtagtcgagggggtctgacaggatggtcacacgcttgtggttcttggccgcagcgcggagcagagtcacaccaccaatatcaatttcctccacggcctcgtcgatggtgacgttgaccttggcgacggtctccttgaaggggtacaggttgcaaacgacgtagtcgaccttggagatcttctgctcggcgagatccttctcgtcggactcgatgtcacgggcgaggataccaccgtgcacagcggggtggagggtcttgacacggccgccgagcatctcgggggccttggtgatggcagagacatccctgggatcaatcgttagttcctgggctgggtattgatcctaacgcttcttcttatatttcgttgcgtcatcgatgacagaggcaactcactcgacagggaatccagcctcacggatcatcttagcggtaccgccagacgcgagaagacggacttcctgcttgaccagacccttggccaggtcaagcagaccagtcttgtcatagacggagatgatagctgttcaatcacaaaatcagaatattagaattgaccatgaactgcttggaataaataaatcatagtccggggaactatgaagccaagagtgacataccggtcttttgttgagacatgatggatcctacggtcgacactagatatgttagataaggaattcccaaatgcagcccgcaattgaagcaattgattgatatgaagactccaatgacatacctgaaaccaagcgaagagggtataacaaatgacgaacagaaagaaaagaagaaaatatgactcgcggggtcggaccgattgcggcggcggggcttgatagcaaaagttatattacgtgatcaaccacagcccactgtggcgcgacccaatcagagatcagtattatgtaggagaccttagcggcacacgtgacctgggaatacataagagatttctcagatgcgccatcttctccttctctttttcttcttcatgaacaacgcaaaactcacattctactcaaaaagcgttcctacgaagactcgtctgatgaagtacggaaatcgtatagagaatggagaccaagtgccaactggcgaaggtatcgatcttgggtgcagtgcctgcttgacctcggtcatgtagtagggattgcaatgattgattctacataccaatcggaaataataaatataattgatattctttttgaaaacctcgcttcttataatctttgtaggtttcatcagagttctttgatatacggagtaaagtagtcttctgcgtagcaaaaattcggcgtagccgagttctattacaattctttatcagagccatgaattatttcgaatgtacattaaacgttccctatccttcatgaggccgttcccagcaaagctcgagtcctcaatcatgaaccaggaaaactcgggcgtttttgagcctcacgacttcataacgtttttgacgcgagctccgatggcaagctgacggccaacatttccaaagcacacgcacgcgcagaaaatgacactggcaatccaagtgccgaccgcgaagctctcctgtgtgcaaccgaaatctggacccagcacatgctctagtcctgttccattcagaatgctggtgcggaatgggccggtcgacgcaggcacaagctctggcttaaggccaaggaccacccccatgccggccaagccaacggtggttgagaggacgaagccggtcgtggtgcggtcaatcaggtaccagagaacgggattcacgagcgcgagggttagcgatgcttgtgtggtagattcccaagggagtctccgctgtaaagaaaaaagagaagtcagccttgtcatatagcaatggagcaaaaaagaaagaatccacttaccatggcaaatgcaattccaacaaacgctccaacactgcgagcaacagcaacccaagccggggtgcgatccccactttcgtcctcatcggtactcgcaagctcggaatcagactcgacctcaccatccagccaaggaagcaggttaccgagaacaacaccagccaacccccaggagaccaagtattgcgacaagtcgtagtaatgaatattctccagcttgacaggcgtaatccaatggttatcatgaagataaacagtgatcacaccgtaagcaagaccaaagccaaagagcagcacgctgctcagtgcctgcggcaagatcacgccccggaacattccatggctcagacgagaccgagtcctccgcagcgacatctgccgcggttcaatggccgatttctctgcttcgcgctgcgactgctcgggcgggaactctgactccggactgttggcttccgtgccccaggggctagactcgtcgcggtccgccccgtcaaatgctgtcggggagtagatcccgtacagcgtcgaggaggtcaggttcatcactgatcctgtgcggctcacgctcgttgagttggacgcggcttctgcttgcgggttcaggtactctggctcgatcggtgttgggggaccggacgactccgtggaagcgggcgtcagatcgaatggtcgtctcgggcgcggacgcaggatgcgagggtgttcgttcatgatggctaaatgtatttgtgtgttgatttcaaagctccttaaattttccggggaccagatgatcgccggcgcgacaaaaaaaacttgtgttttatttgtcccacacgtttagatgatccaagctctgtaagtcgagctgtaatagatggcacaagatgatctgtgactgggaatgtgttaagcgaaatgtcaaagtatggggaaaggagaaaatcgaaaatggagactgggggagcttagcgggacatgacgcttaccggaaatataaacttcctcgaagcaacaagggtcagcttgctatttatctcagggttctgggatttccgaggttaaatgaggtcggttcaggttggggagaagaggaaaagtgtaagcgtaaaggatctcaacaaattatgtacccttaggaatccgcctcgtattgttggccgcaccgctctgtagcaattcgtatccactcggacaccggactcccgttactcgtatgatctgctgaaatttctctgggatttctatagaagtggacagatgtacggagcatgaaaaggggagaaagaggggaattatcacatgcaatgcacgtcggatgtcaaggtagtactcgccacttatgtcaagggcttgggtggaagtgacttgaaatacaaccattccggaagagaatggtacgcctagaacataggagaaagacaaaagaaagagtagatcgtgatacacaagatttcaaaaacaaaacgccaacccattagtcttccatcgcgtcgtctccataacctcccccgcgtgggctaggtagaccccgaggggctggggacgaggcttcatgtcgtccgtaaccattggcgccttcataggcggaggaattttcatcaccgtccacgtcatcttcgtcatcctgatcgtcagagaagtccccttcctcgtccgctcgtagaggggcacctccatcatcttcgtcgccagaaacttcgccaaggagttcgcggtcgagatcatccagttctccctccataaagtcatcgggtccgtgctcagggtcccaggttggggtacccatagccgatggccctgcgcccaaagcatcgggatggccgtgagtgcccttggcctgtaacgctgcgggtttcttgatagtgccggggttgttcgttacacccgtagacttgcgcttggaagcactaggacgaggacgcgggcgggatcggttgttggaacttcgcacatcagcttcgagagccgccttggcctggtatcgctcctcgcgctccatcttgcggtctttcttgggaccattggcttcggtgtaatcccagcgatcgagtcggcgggctgcttttcgcactacagagagaaagacgctcgcacattctccaaagtcatcttcttcttccgggttcgggaagaggccacccttgccccacgaggtttcttcgtcatctgtatcgtagccctcgggcagaccctgaagcaagcgaccgtagcgcgcgaaaggaatctcactctcccgtttagcacggagaacgcggtatgcatttgatttacgtttagccagcagatagtcaatcctctgccgacgattttgctcaacggctatctggtgctgtgtaagtggccgcatccgacgcatagtaggtgccgatgaaagcgaaggctcagtaataaagcggttaagaactggatggttggggcctggaggagcgggggaagcatcgggagtatgttccatcctcgttttcaagatgagtcgctgttggcccacggctcgattaagtgatgattcccgcttggcctgtttaggtcgcggacgggagtgaccgggggtcatatcatcgtcctcatcatctaagctgcgtttagcagaagggtgtagaggggtggacatagcagagccacgacctcccataccagagtagtctcctgcgaatgattcttcgtcaatgccgaattctgcggttagaaaaggttagcgttctgtagacatgtacaatatgatagctctccagaattcccaactcacctttcttgggtcgcttgggaatgcgcggtagtggttcctcttcttccaggatgcctgcgcaaaatgtcagtgtcccattttcaacagtcagacctaggcacacgtacgtttgcgctctaatcttttggactccccgtattcctgttcctcgggtgtatctaaattctcttcgctggcttgttcctctgtcaagatatcaaaggcaggtactttcaaaggaaggccctctgcaccctcgccttccacacctggaccaaacggattgttcaaggcagcctcgcgactgaaatcgctctcgagataccaccacatcagccagaggaacgccctagcgcgactttggctgctaagtgtagacctcataactaggtcgaagaagtctcgcggaggaaagaagtgtgtttctgacactttgggggcatactgcgccagaacaaaaatcaagttcacggggttggtccgaggtatattctgccgcttaatcttttcgagggtattcggctggtccacatcctctgaagcgcccttcagaatagacttcagacgaggagcatcctgcagctgcttgtaggcgttggaatcctgatgcgcttgtagtgaggggatcgagtggtaggttcggagttgagcacgcatttcggggaagactagaaatcgcgacgatagtgattagcacagaggtcaagtatattatggcatagctgcaagcgtacagttcagggtagtgttcatgcgaccgaaattgaccagcagacaaaccatagccatattgatagccgccggtttgtcgttctgcagtttatccttcagaatcttgctggtcttgctgctccgagccatcgcattgatgtaaacatccgcgaagtccattcccttctgtccgtcgggataccgcgtaaaaacaggcgttttgtcctcaaagaccagcttcaggaattggtactggatatctttgcgccatagaggtatgccgtcgtctttcttcaggtgtcgaatcttattgccagagtagacagagccaattgtgccattcgcttgccgccttgtaccgaccgttgcgctcgcggtcatgccgtgagactggtcatccgcagcctcggacatcgcgaaggactcgtccatcatactgttttcgaagtcggtcatcttgggtttattggaaccgctagcaggtccgcgatcaggattctaggagaatcgcaagttgtaatgtgaagtgccccctaggaggcggccgatgaaagaggcagaagtagtgtaagaggaacgaaacgaaaaaggaaaggataaaagtgaaaaggagtgccaagtaaaaccgggaaaagggaaaatgaagttcaaaagccggaaaaagaggaagaaagcagagccgagtggcccatgaaggtatagctggtgtgatatctacccgtatcagacctcgcgcgtttaatatggcgcttaatgccacgcatttggatttccaatcgacggaggaagcagcgcaatagcaactaccatttatgatgtgtgttatttacatgcatattagtcctacggaaatcccactttacaacctagagaagaattggaaacacttttcgaaattgcattggataagagaactttccttctcatggccatctcagggccgttggttcgcttgttcactcctaattcgaacccgagaattcataagtatgcccattcttccagtggcgacagcgccctatcccccgaggtccgagaaaaatgatcaaaatagacaaggaaatgaagcaagatgctctcattcggagataatcagcctccacggacccgaaagcagaggacatgcagttgcaggtcaagccaacgccatacagaatgcaaagaataccttttttggcttcgaaacacaccagccgcgccagggggtgtaacggcgagataaccagtatccgaaaaaaagcgcggagaaagaaagcgcacgtttttgttttcgaaaaaaaaaaactcgactgcagaacgcacgagggcagcaacagaaacaaatgtccgccatgagataccgacgctgtaaaaagtctatgctgcatatgatgaatgcagccataacaacaccgaagatgaatgcgaagagaaaaagaaaacttttcgagatgatgaaaagtcatcaatctccgctcggcgcacgcgcgtcactcgaacgtatccccagtggggatgctcgaacataaggggtatctgacgagagcggacataggaaaaaaaagacaacgcattctatgatgttcatgcagtttcgatcacgggttgccccaagagagtagtggtgtctcccaggagcaaaaaaagaagatcggactgcgcgaatgcctcgtatccattacaaggcaatatttgaaaagccatgaatagaatcagcgaagagacatgagaggaacagcaaaggaaacgagattaaagcatacgcaaacgggaaaatatgaatctaaaacaagcataggaaagtcgtgcagtcatgacaaagcccgtccctgagagatagcacaggtagaagagaactcagggactcaatctgatcgtatccgtcaacgagagacaaaagaaaataaagcaagggagccaatcagacccgagggcatcgtcaaaagaccacgactgatttaccaccaggaagatgggccggaggagccggaggggttgccgtagctaccaccacctccaccgtagccagcaccaccaccgctgccgccgtaggcgggagcagcagcaccgccatagccgctaccgtaggagggggcagcaccaccagagccaccatagccaccgccaccgccgaagccaccacccatgccgccagggatacgacgcacatcacgagtagcagtagcaccacggccacggccaccaccaccacggccacgaccgctgaatccgctaccttcgcgggcaatgctctccaggaaagcgggaacctcctggtgggcctccttgagaagctcgagcaagtcacggacaacaccacggttgccacggttgaagaaagcagtggcgataccggtgttaccggcacgaccagtacgaccgatgcggtgaacgtagtcatcaatgtcagtggggagatcgtagttgatgacgtgggtgacgtttggaatatcgagaccacgagcagcaacggcagtagcaaccagaatagggcagcgaccgttacggaagagctccagagcacgctcacgctcgcgctgggtgcggtcaccgtgaatggcggtcgcagggaagcgctggttaatcaggaaatcagagagcgagtcggccatgcgcttggtttcaacgaagatgagggtcaaaccagtgctgccgtgagtgtgaagaatatcgagcaggacggagcgcttgtcagcatcctcgacatactcgaccttttgagtgatgttctccgaagtacttccgacacgaccaacggacaagaaaatgtagtccttgaggaaatcgcgagcaagcatttgaatatcgcgggggaaggtggccgagaacatgagtgtctggcgatcgtcgacaccgggcatatcctcaccctcgacgatacggcgaatctggggctcgaaacccatgtccagcatgcgatcagcctcgtcaagaacgagatacttgatgttagccagggagatacgtccacgctcaatcaaatcaaccagacgaccgggggtagcaacgagaagatcgcaaccacgctcgatctgacgaagctgagagccgatgtctgcaccaccgtacacgacgcaggggcgaacccatgagcggtaggcgaacttgcgggcctcctcgaagatctgagagaccagctcacgagtgggagcaaggatgagggaggtggggtaagccttacgctggcggccgtagctgaattgaccaccaccgccaccctgggtaggggcagcagaaggaccgttctggaaagcttgagagaggatagggaaaaggaatccaccagtctttccggaaccagtctgggcacaagccataagatcacgtccgttcatgacgatggggaccgagtacttctgaacgggagtaggaatgacatagctggcaagcttgatgttggcaatcaggtggtcgtccaggggagggttagtgaactgggtaacaggctctgggacatcgtttccggaggcctcaacggggatatcatcgtagttggagaaattgattccagtctgctgcttagtggggtcgtttggcactccgaacagctcgcgctccaggcgagcattggcaggaccgggaacgtgcttgccgtcgcgccactggccatcgcctgagccaccacgggattgctgagaaccgccaccaccgctgtagccgccgctgctgccaccaccgctagcaccaccataagaggatcctgggtttccgtaagcattgggattgaagggccggagttttccatcgggagtccagctggtcataccgttcgcggggccacgagggctgaagttgggagcgctagcattagcccagttggcaccggcgtcactataaaatacaaaaatcagttgccgattcatgatagtcagtcattttggtactgtaccgaggaccaccgaagccaggtccagaaggagcagcctcagcgttagcactgggggcgggagcgggaccagaaccgggaccacgctggcgaaggtgaggaggaatgtaggcagcacggccaacaggggcgttaccctggggggcgtgctgagattcgttgagggaaaggtttcccatttgcaaaccgtcggccatttttgcggttgaaagtgtctattggaaagcaagagttagaagatgtccgatgtcgacggtgaacgatgttgcgtacaggtttttgcttcaccggaaaatattggtcgtagataaagcgcaagtgatctggaaaagatacttgcaaagaaaaacaaatccacgtaaagtgtacctttagagagagagtgtgtgaaaagatcaaatcgcttttctgttttaactcgataagaaaaaaaaaaaagatcgagtggcaacaagaaagctcaggaaaaccacagagaatatggaaaatgcaaatctccggaatctaagaactctagagagaagagaaagagagagagagagagtagtgagaaaagggatgatggaggggggttgaatcaagagagaaagagaacggatgaagtctgtgggaaggaggcaacaaaagttggagacttggggcgtgtgtggctgttggaggtacctgaatggaacctatctgtctgctatatttacctgcttactagaagtaccggttaggtacctaccgccactgaagaaatttctactcgccagttgctgcacgtaggcggtctggacacccttgcctgactaagataggaggcgaaccttacgatctgagtggatgattttcccgcagtcccccaaagtatatcaccacctacatacgtgaggtcacatccatgggtgatctatgatgagggtcatcgggcattaaaatccaggggtttagggggacagaaggtccaaaaataatgtctcattgatctaatatcatttcttaggcatcatactgtttctctttctcttgctcttgctgctggcctcgccgacgggcaatccagatacccacagcggctaccagaacgaagaaaatcacgaccagctgcagtaagtaagatggcgtggcctcgggagcatcgggagcattttcggtgacacttggctcttggtcgagttcttaaagttctccaacatcatcagccacttccaactagcagcagaaagtagacagtcacctgtctagagctcatcgcggctacctttttcctcggtctcgggctcaagctcgagctcgccgctcttcacaatcttgaccgctagcttgggcctgtcgccggatcccttgggaacgttttggatcttgtcgacaacctcatagccctcaaggacctcgccgaagacgacatggcggccatcgagccaactgcgttgtttccgttagttattgccccaaaggaatcactgcaagggatacgaacgaggtgatagcggtggtgatgaagaattgagagccgttagtgtccttgccggcgttggccatgcctaagaatggtcagatgtctgtaagattgaatcaaatgagtggaaatgcctactcagctggcccttcttggtgtgacgcagcttgaagttctcatccttgaacttgttgccgtagatcgactttccgccggtgcctgtacacacttagaataatgcaatcaacttgctcggaggctcacaaaccatcgcccttggtgaagtcaccaccctggatcatgaagtctttgataacacggtggaaggtagagtcctggtagccaaagcccttctcgccagtagccaaagcgctagacatgggttagcatatgcaggataaacgttgcagacattgacatagcaatgcaccataccggaagttctcagcggtctatacaaataataatgtcagcaataattatcaattagttactgagagtatagttctacagacctcagggacggtcttgccgtacaagcccatcacaatgcgaccgaggggttcgtctccatgctgaatgtcaaagtagacctgtcaccaacaatcagtaccgcttgcatatagaccgagtcggaatatcaatgtcaatcaccttgctggtaatcttagggccgcgaggctccttggcctcttgggcttgaaccagggcaaagccaacggcgaagacaaagaacagggaaacgagaagattccggaaatacatgattgttaattgccactgctctggtaggatacagcgagacgggaagatagagtaattgggagcggaagaaggccagcttgcaatgcggagaatagacggggtagtgccatggaattcaggcaccaagttacggaaaaacgttgacggaggatttctcccggagttcaacgagagcaacaagtgacggctccatacgattgtcaggacatcaaccagccagcacagttcaagatggtatgttagccaccgtcaagatacaatagttcctccaaagaaacctgctaatagcctttaggtcttcatccttggtgtcaatttccccgagcggaatctgctcaaggcaagccaacccgcacgattgcgcccatagcctggatatcccaactaacatacattgagcgcaatagaaatccctcgagaccttcttcggaatcggcagcaacggctccggtcgcctcatgtcccgcttcaacatccatccgacctgccgcgtcggcgagctggccaacaagcaggtcctcgacctcacagccgtgctatccgaaatgaaaattgagaatgatctgcgcagagaagttctcaatgatatcaagcgcatgaaagagaccggaacttaccgcggccgacgtcatgcgctgggcttgcctgtgaggggacagcggacacgaactcaggtgggtttccccttcctcctcgtgctctattgatatctcatattgcacctgagagacctatgcgagcttatggttaactaaatcttaatagatcaaaactcctgtcaagttgaaccgcatggagcggagactataaacttgatagtgtcgtgttcgattgttacttttatgggatcgtctcactgtttttcgtgagaggcatggatttggcgttgtattgatttctggcactcgacctttgccagtttatatgtgaacggaacccctctgtggatgtattataggctaggcataaacctggggtgaatggaagcttcaaaacagaactatatatatgtacggtaaagtcgtagtgaatatcaggctgtagtctgacatatatccaattccgagctaaagatgtacgcaaagatgggaaagtaaggagaaaaaaaacatgtaagtctaaacttttgccctcaaccaagtgttaaaacgccaggcccatatgtgcactcatgcctccgaaggcagtacgccttcgccgcggttgatttggatccgcttatcctctcccgcgctgacaatgcccaccgtcttgtcccagcacacgctgaacaccttgacaccttcaccgccaacccgcttgctatcggacttaccttcctcctcgaggctcttgcgagtaattgagtaaacgctctcaccaacaacaccttccttgtcggtcttggtagaccggatatcccaaattctgcacgtgccgtcgtggctaccgctaatgagtccatatgtgctgtgagggtcacgggccaagctgacaacagcgttggtgtgacctcggagagtcatggcagccacagtagtagcagaggcacgtgggtcaatcagagtgatatggcgggcggcagtaccggcagccaagaggctgagttcggggaggtgctcgagcgagaggagcgagtgtgatgtggtgcgagtgtcaaccagagaaccagtgaccaaatcccatgtccgcagggagtgatcccatgaggccgagtaaccaacggtagcatctcttccatcgaaaatagcagcagaaacaggtgccgtgtgggctgacagaagagtcagaggaccacgctgcggtgtgctaacggaggtgttcagcttgcggcgctttgtgttccgagcattgctagaaggaagcaagttctcaggtgctgccggggcatcggtcttcttagttgaccagaatccaacggtgctatctgcggaaccagtcaatagacggttggacttggcatgaactgctagtgactcgattccagccttgtgaccatacagctccagctgaggagaaatttttccagtgaaaccaccttcaccctcagtatacttccacaatcggaccgtgcgatcaagacctgcggatgcgatctggtttggagaaacgaacttggcggttctgatagaggcggtgtggccaccatcggcggcggcaggagaggtcgcgatagtctcagacgacatattccagatgcgaagcagaccatcatagcttcctgatagaattctttcttggcccttagtaaaagtcgcacctgaggcccaggatgcagcatgtgaggtcgtggaaaggacgtctgtcgcgctaacccagtcatcatgctggaacgaggcgatatgcaggggcgggatcagagctcgaacatattcaatctcgagggtcgtctcagctgagataccgttgtcgaccaaatattcatcgatcgaggtccgcaaaaaagttccattgatcaaaaactcaaatggaatgggcttttcgcttgagagaaggttgttcaccagtgtcgatagcgcatatcgtcgaagccctttttaaaggaagagtcagtatttgatactactatttatgatttctgatcggcaatgggtctcacctgtaggaacaagaattggaccggtgctttcaggcagagcaatatcctcctgctggctaatgagctgcacacggacttgtctctgtgctgactctgcagcagcagaagtgactagatcttcgctcattgtgaaatcgttcaaattgctgccggtgttgcacttttttggtggctgtcgcattttcggcgggtgaggaaaaaatacggcgacccgtgcggcacacttgcgcagagcgcggagatggccccactcggtctacacagcttattgtaatacactgcagttttaacatatatctggtgaatgaagtgatatttctattacgtggatggggcttatcatctaggcgctcttcgaatctctgcaatagcacgtcgccggtgatcagactctgcgaacaaggcctcgatcaggtcaatcacttcgtcagcagagaactctaagcccaactctccttcgagccaaaggaatttgatatcggcgagggagctctctagaatattgatcatatattggaaacgcagccagcttgaaacgtagatggcagtgacgggtattgcctcggcatcaccatctgtctcacgcatgaacaggtcctccaattttgagagttggttacagaaggagaccagttgccgtgactgatcctccgagatatcacccaaatcttcgatatcgatgactaccttgttgatcacagtagataagagcgatccaactgattggagcagcgcggaatgagacagtatgggttgccattccttgtaaacgtcgcgaattcggtcgacggttgcgctaacagaattctcacagtctgcctggaatggctgctcggagcattgtccaaatccttgggctccgtcaagcagatctgtgacgatagtgcgttgcgtctgcatctctttgctatacgcaagtttgccgaatttctccaaagcttcaacgtcgggctggagtttggagagtgcatgttcttcgactagtttccggatctcatcggcaaggtacagactatcattataaaggtacatctgccctgaagtgagtttcagcgagtagaatgtggatgatgtagctttgaacatagccaggatcaaggttggcaatgcaagaagaccagcaccagaagaagcgacgcgggaattggcgtagctgggctctagttagtttgcaaaggaaacaagttggaagacggcatgacttacgcaggctgcgaaatatccttcgaatcggtgatttgctgctgaacgaccttaagaacagactctgggacatcggtgattgtgaagacttccttcagggtaacttcctttggtgatacaaattgagttgtattcttcgtgtcggttgcgtttgtcgatgatgttttctggggctccgaaggcttattatcaactttatggtcatcttcatcctcatccccccagccccaggcatcatcgtcatcatcttccgcagaagcagctgcttctggtttggcatcgggagtctcctcgacgtcctcgtcatctagaccccacgcactaacatcttcctcttcttcatcaggctttgctgtttctgctttcttgggctcatcttctttatcgtcatcccagtgggcgtcccagtcctcattgccggcattctccaataaagcaccttcagcttgtgaaacctttcctctttcaattcgttcgacctgtttcgttgttccctgactggcggcaaggactttgcggacgctatcgagcgagtcgactctacgccgagtcaaccacaggcgtggagcttggttgacccacgagacgagttcttcttggccagtccaaccccacgactctatctgctgggtgaactgtgaaacatgactcaggatattctcaaactcggcgaggccacctagatcggtgggaatagcaggggacagccactcgcagattgcctttgaggaaataatcgcaatgaatgattcggagaaagtcgcggacaccgatgacggtagattttgtcgcaagtagcccaaaacgctggaaaggcgatccaaggtctccagtgcggtcgcctttgaggcctcaggctcaatgcgaatgctagtctccgtcaccaccacaccatggctagttccattagggtgaggtagcaagatcggatttacgatcgccgaaaagaggtccctttgcagtttctcgatggaggatgtgagtatatctagtcgggccagcgacgtaatagtgctctcaatagaaccggcatctgcatctccgctagagacatggaattcgccttgttgtcggtcaactttcaattgatcagcccagcgcgaaagaagggcctcaacaatctccgatcgtaacagtgacacctcatcggagagtatacccatcacatttgtattcgtaaagaaggcatcctttccaacagctgcgtcggtagactccaattgttcaatggcggtggtgatctggccacttctgagagcagctcgccctgtttccagctgctggcacaagcggtgcacctcctctagggtatccgctacggcctgattgaaggcaatctccgtctcaaccaaggtgactttcgctctcgcatcttcaactttcgcctgcaggggttcggtatgctcatgctgcgcgactatttctcgcgcagttaatcttgagcgttctatgtcggcgtgaagttgtttcgcttggataatccagtcgtcggcatcgaaggtgttctcgcgactcaaggagctaatctcattctaatcaaagcagcgctggtcagtaatgaatgcccgacgtgcgtagatagccattgggggcttcgtacctctacctgctcacgtgccttcgatataagctcgagctccctggcgagagcagctgccgggaagttaccagcaactacactctcctcgggataggtcccttcggtgacaaagcccagcaccgcctggcacaactcctcggtatttcctgccatgataccaacttttccaaaaccaaggacagattgtcagggaacacgagcttcggagcttcggagacagatgtgcatgtaaagaggagttgagctgtcaacaacccgtgacttcgaatttgggcgtcaccgccccccacgtggtgtatacgctgtatgctttcgctctagatcgctaaattcgctagaattttaattaaaaatatatctcgtttgtatttgaatggtcgcaaagaatccaaaatctattagccctctctctttgttatataaattctttcagttgcccgctttgtaaggaaaaccggagactgagctctctcccaaacttggaaaactccgggaccaacacaacttttgaagacatctcagattcaccgtgtctcggatactccccctgagtcgaagtacttgttttctgtaagtcaatgtgaattgcgttctcagatcttattgcctacggaggggcatcaagtgtatcaaccttctatccccaatttctgcttgtcaccccgcctatgtcattgtccttgacaatatgttgcacctttcaagatatgatttagaaaggacctcgccaattgctgcttttgttcccattctattcaaacgcgactcggggtggatattcttctctcatccgagttgtggtggtcatacttgttctcggacaattccttaccgcacgtgcttatgtgctcacgactgtatcaaatgtttaataaagtgacacgaattgctaactaatcaacaagactgtcaaccctacggcgaaatatcttcactgggtctgtcccattgatcaatatgtcgccctcggtgcagaacagtcacttcaaactgctccagcagttcaagcctgactactcggcgagcgagttcactcagtatgaatcacagcgtaccggcatgagagtggtcgttatcgaccagccgggtcccaaagtgaacggttactttgtgctcgctaccgaaatccacgatgattcgggtgctcctcatactctggagcacttgtgcttcatgggttcccgcaattaccgctacaagggcttcctggacaagctagctacccgcgtgtactccagcactaatgcctggacggcaaccgatcacactgcctacactctggataccgcaggctgggaaggctttgctcgtatcctgccagtgtacctggagcatgtcattgctcctaccctgactgacgaaggctgctacactgaagttcaccacatcgatggctctggaaatgatgccggtgtcgtgtattccgagatgcagggtgtacagaacaatgcggctgagctgatcgatcttgcagcccggcgattgacctacccgcctggtgtgggcttccgctatgagacaggaggtatgatggaacagcttcgtgtcttgcctgcggaacggattcgcgagttccaccgtgagatgtatcagcccaagaacctgtgcctgatcctcactggagaagtcgaccagagcaacatgctggagatcttggataagttcgaagacactatcttggatgtcattcctagcccagaggcaccattcaaaagaccctgggtggattccaaacaggctccctacttggagaagtccgctatccagaaagttgaattcccagaggaggatgaatcatttggtgaaatcgaaattcgattcatgggaccggactgcactgatactatcttatgtaagatacaaaaccccaagattcgatatcaaatacttacagtatcatagccggcgctcttaatgtgtcacttttgtacctagccggttcatctgcagctctgctagagaacatccttgttgagaaagaacagctcgccagtgccgtctactattcaactgaggaccaccctagcatggaggttcgtttcacgttgaccagcgtggaaacagagaagttggagagcgtcgagaagagattctttgagatcctccaagatgcgatgaccaaggaattagatctgaagtacttgaaagagtgtatcgcccgacagcgccgaacctggaagttctcgactgagtcttctgcctcttcattcgcagagtacgttatctctgatttcctgtacggaaagcgcgatggctcgaccttgatggatgtcgcaactctgaaggaatatgatgtccttgaaacctggtccgaggaccagtggcgcgctttcatcaagaaatggatctcagatgctccccatgtcactatcttgggtatcccgtcccagaagatgtccgccacgcttaaaaaagacgaggaggaccgggccgctgcgcaaaaggagcgtctcggcgagaagggcctgaaggagcttgccgataaactcgataaagccaaagcagagaacgacaaggagattccgcaggagttgctggaaaagttcgccatccccggaactgagtcaatccacttcatggagaccagtacggctcgttcgggtgctgccctgaaatctggacggcccgacaacaagatacagccatttgttgatgccgacaagtctgaccagtcacttttcatccacttcgagcacatccctagtagctttgtccagctttcagttctcatctcagctgattctgtgcccgttcagttgcgtccattgctgtccatctataccgaggcgttcttcaacatcccggtggagcgtgatggcaagatcattgactttgagcaagtcgtagtagaattagagagagacaccgtcggatactcgatgacgactgctcgcggtcttgggaactcggagatgctccgtatctccttccaggtcgagctggagaagtatgcgaatgccgtcgcctggctgcaggagctgtgctggaagtccgtcttcgatgtggagagactccgggctatcaactctcgtctcttggccgatgtgccagactccaagcgcagtggtgactccatgcttgctgctgtaaatgtgatggttcactacgcagaggagtcgatcacccgggctcgttctactttggtgaaggctcgctaccttaagcgcgtcaagcgtctgctctttgagaagccggaggaagtcgtcagccgcatggaggagatccggaaatcgctcttccaacccgacaacgtgcgcatcattgtcattgctgacctcgagaaactccagaacccggtctcgacctggaagcccttcgccgatgccctgggcaccagcgctgagttgcggcctatcactgaccggcgatcccagctgagcgatgccggcaagaacattggcggcaagtcttacattgtccccatgccgactattgactcgtccttcgcctacgccaccgcccgtggtctgacctcgtacgattcccccgacctgcccgcactattagtcgcgatttcgtacatgaacgctgtcgagggtccgctctgggttgcagttcgtggcactggtctggcgtacggcactaatttcagttacaacatcgacaccggctttgtcaacttcgatgtgtaccggtccccgannnnnnnnnnnnnnnnnnnnnnnnnnnnnnnnnnnnnnnnnnnnnnnnnnnnnnnnnnnnnnnnnnnnnnnnnnnnnnnnnnnnnnnnnnnnnnnnnnnnnnnnnnnnnnnnnnnnnnnnnnnnnnnnnnnnnnnnnnnnnnnnnnncttcgttgtgtcccggcccccgaacgcccacaaggcgttcgagtctagcaagaagattgttgatgactatctatccggtgctacgactttcgatcctttgatgctggagggtgctattagcagcatcgtggtcaactatgccaacgagcagatgaccgccgccaatgctgcccagggcagtttcatccgccaggtcgtgcgcaacttgcccagcgactataaggagaagatgctcaagaatgtgcgcgctatcaccatcgaccagatcaagggtgctctacgtgagatcatcttgccattgtttgatccgaagactgcaaacttggttgtcacctgcgcgactgtgttggaagaggtgagttgttcccggtctttacgatgtacgtatggattactaactttgattgcgaacagaccatcaatcagggcttcgaaagttccggctttactcccacagttcaggctcttaaggagtttgaggacgactatggtctgaaggttggtgacgaggaggaagatgaggatgatgacgaggatgaggactccgaaagcggatccgaggatagcgacgacgaaagcgaagacgagtgatatgttttatgaacgatatctacataggtagcgaggtagatcacataaagggaattgtggtgtcaaaagactctacatcacctcgacagtgatgaatctactctcttactcactgaaaacaggctgagactcagtaaacaccgagatctcaacttaaacaaacaaagctgaaataatcgcactatatgaaatgtagtcacacacttcctcagaagaggtaaatatggtacacgccaggcaagacccgccagcaaccgtcttgcctgaacccgaatccaatcttgaagactgcaatagttccaagaatagataaatcggtgaactgacctcttactttactcccatcgccgtgagaaggtacggatttcagtcaacccagcccaccccggcctctatgcccgtcatcgtccacagccccgaacgatttagaggtcagacccgaaacgaataaaactaccaactcaactccttccggcccttaagagtcctccgaataagagtcttacgtccattcctgtccttcttgcgcgccaggtatccatggcggcgcttttggacccgtcgcgacgggctgaacgtcacacggcgcacacctagggaggcacttgcggagaaagagcggcgctgcgagggtgtcttctgggagaggagtgatgacaggggtgagaaagcagttgcggttgcggttgtggttggcgaggagaggcggccgccgattgttcgcgagggttggaagcgggttggcgtggagaggagggaggagaaggagcgggatgagagcattgtggagggtgtgcttaattgttgcgggatttgggcgaatctgttgtcgggggagtagaggtattagctgtctggttggtttcgtggtggaaaggttgttggctgctgtacctagtcatcggggtccgcatggccgatgtggtggcctggaaggctgagggcacggccctggtgcggaggcagaacattttcaggtccctggctttgtttggagggcgattttgaggtggggtgggaacttcctgaagttggagatcgagtgaggcctgtggacaagacgcggcgtcggaagacagaaaattaagcgcggagccgcttacacggacccgcctagatatgcatggctacaatgatgtacggttgtacttaggttatacaaaggatagaattgggtaggtttagagtgtaatatctacaaccctataactataactacgcttgtttagctgtgaacaaatataacagtatacttgcagccgttaagaagacctacccgatcgggactagcgtcaccgaacttttttgatctcgagattcgaaatgctggacatcgctcgtgcaactctccgtcctactcgcaaatcacactgaactcaaggagaactctactctcagctctgtcactcccattaccgggttaaaccactctataaccaccgccaccaccactctttaacctcaaaaaacccatcaaacctacgaagaataaccaattccaccaaaatggcaacccaaggtcctcaggccctgcctccagtcacagtgcgaaacacacatgtcatcagccagtccgcagcgcatgaattcctagccgcctatctggaccgcgctgcgacagacccatcgttgcaacccaacgccagcatcagcgagcatggtcctgtctcacggacaaccaccgcagcgccgaacttgatcctgcacaacttgaagcgcgttcaaatgggcctagctggcgagttccttggtcgtgatctgactgtcgcgaagcagaaccccggggaggactatttggatgttgctgcgggtattccgcagaccaacggccatgatctgccggacgaaagcaatgatcttgtcatgaatgatgctgagtttggcatggaagctgaggctttcgcggatcaggaggccgggattgataaggaggaacgcaagcggaagaagaaggagagacggttggcggagaagaagggtaaggccaaggcgaaggctgaggaatccgattgagtgtggtgtgggtatatatatctgcttgtgggcgttgctgcattgggtcggagtcttttttcttttattcgttctattgctctattactctgggctggttgggttttggacgtacaaaagcactgctcgcatttcatgtctggaacaaaaagtgtcatttaagagtttagacggattgctacaatccaatcaatacataatagaacatttccaagcctcgcttttacttctcgagagttgagttccaccatgtcgacacaaaaaagtcgtgtccatgtcatataaaaatcgccagtataacacgcaccacgtttacagctcgcgatctgcggccttgacaggcttttcactgtcctcctccttgttgctagtgaccttgccacccttccagccaagcgcagcgagacgctcggtgaggatggggtgggagtagtggtagctagcataaatcggatcggcatccatagtgctcaagttctggatctggagcttcagtagcgaggaagcgagcttgtcagagtaaccgaggttctgggcgaatttatctgtggaacattgttagtaaaaccgagtgtaaaaccgagtgtaaatgtgatggatcgaatggaacataccggcctcaaattcgaattttcggctgaggatgttcatgagaagcttcacgacagcatccataggagccagggcgtcggagaagagcaggaaaccaatcatgataggctgttcgttgatgaatccgaaggactggtacaacgacttgttgttgacaaagacggagaagagagcgaaaatgtagaacatgtgggcctggattacatagttagtgataattcgccaaaagagcaactgaacaaattcgtacctgggcaatgccgaagagcttggtggtgtggctgaggctccagtggccaagctcatggccaagcacagcaacaacctcctccggctcggtcttctcaatcaaagtatcgtagatgacaatgtgcttcttccatggcagaccatagaagtaggcattgctgtgggcactgcgcttgctgccgtcaatgacatggagctcggagagagggaagttgagtctcttagccaagttctcgacaccggtcttgagttcgccgggctgaagaggcgagagcttgttgaacagaggcagaatcgcaatggggtagatagtaatggcgaagatctggaggaagacaccgaagagccagaggtagtagtagaaggaggtgtcaaacttctgaacaatcttaagaacggcagtgataataggagtacccagaacaattccgagcatctgccccttgagcatatccgtaatccagagcttgaccgtctgcttgttgaaaccgaacttctcctcaagcacaaacgtgttgtagtacgagatgggcagcgagaggatagtgcttataatgttgaaaccgaagaagaataccaatgtctgacaaatttcgccttggaaccgaccggggagataccgagccagcaccagaccgctgaggccccagatcttggggaggacatcgccgtagatgaaagcaaggttttggacttgaccgtaaagaccagagatgaagccgaacttggcctttgcgcgaccgtatgcctgtagtgatgtttcagtaagcctctgtatatgatataattccccgtcatcgggttcatacctgactctggtcaaagaccttctgggtaacctccccttcgaggacctggggaggctttgtccgttgcaaaaacttgtactgccgaagtgacaggaaaccctcaaggacgaactggcccactgaaaatcccacaagcacgttcttccatgggaagagcgggcgatcgagcaaacgcgccaattgctggaggacagttattagcgacgtgtccacggtggaaagcatatttaccgtataaacatgatagtatcaatcaaatcaacttacctcgaggatatacatgatcgaaatcgcgcaactaggcgaagaaagaggacgttgttcaaggcagaagaagctagtttgttattatcggcagccttagtcagatctcatgcatgacccttccatggcccggggcctaacgcaacgtcgatctcaggaattgggcctattaattaagtaaagtcttgtttattttaggccaaatgtgtgagatgaggagttagtgggagttaattatatgctagtctgcctgcatttgaaaagtaaataactggcgctgatgcattgctgaaagtcttagtacaatactcgaagattgtagatgtcatctatactcaaaagggtagtatttctcgagtcgctctatatataaaagcagttggtggcttagcgcgtttgatcatccccgtgcgaggcaatacgagtggttatggtcgtgcaatatatacatccgacctgcagactatctagcatctaccacattgcaaatgtttatatcgattaaacatacagaagctctttgattatgccggccctaatttccctgcatttcagatcacagacctgtataggcctatctacataagatccgataatgcagacaaaaaatgagcaatgaacaggaaacctcttgggaacaactccctcgtacgatggaaataaaaagcacatatcttattcgccgactccacctgcatcccgttcgtcgtccgtccctcagatcaaacccgagcatccagtcgcggaccaaatcaagtggtcgctgacatgcatgaaggtaaaccgatcaaggtggcgacaatacatgcattgcgcatctcctccatcttctctattcagccgggggaatcagttaaatcacgtctttaattttccgactcgtcatgaccataaacttttttgcaatcatagatcgcaagactcgtgttcgagggttggtggggtgggatcgttatgcggagatatagcaagatttatgtgcaaatcaaattccccaacacaacagatctcattccccaaactccccattccgaactgggaaatcgttcaaaggactgctttactgctgcacaggctcaagggtgttaccactgcgaattgaaaaagtcagcatttgtcactagaaataaccccaaaccagtagacttacgcaacaatgttggcccatccgatcaaacgccagtgcttctcaattctgcgactgatggcgatcttctcgccaacttccgtgcaggcgggactggtcaagctgagcttagcggcatcagccttgacaccgaggaccttagcaccagtagcggtagaaccgatgttaaccatcaggacttcgttcttggcaagcttggcaaccttggcctgcttgccgtcggcggtcttgacacccagcaagcggcggagcaggaagtagttgacctcaatctcagtgtagatagcaggaaggcggccacggtgaccgagaacgaaaccgacaagacgatctgcacggcaaagcgtggggtcgacacgggtaccaacaccaatcaaaccgccaggaacggcaaacttgaggtcattgtgctcagcgaagagagacacaatgcgggagaaaatgggtcgacactggatcttgccctgctcatccttggtgacgagaccggggcggatctcaatctcatcgttcagctttacaacaccggtaaggatggaaccaccggcaacaccacccttgagctcatcaatctcggcaccgggcttgttgacatcgaaggaacgaatgatcatcatgtgaggcgtatcctggaagttgcggatggggataggaatcgtctggacaagtgcctcgttgacagcatcaatgttgtacttcagctgcgcggaaatggggataacgggcgagccatcagcaacggtaccacggatgaacttgagaatcgactggtagtgctcaagagcgttatcgcttcgcatgaggtcaactgtttattttcatacgtcagtgcttcgtttcatcgaccgtttacaacaaccaagattttacccttattttggagaatgatgatgtggttgagcttcataatctcaatggcagccaagtgctccgaggtctgcggttgcgggcaagtttcgtttccggcaatcaagaggagggcggcatcctaataaaatgatgttagcctatcaccgatcccttgaggtccgaattggtgcagtgagggatgaaacctaccatgaccgcggctcctgaaagcatagtgctcatctgtgcaaagctgattagcatcaacccttaagagaagctagattccctaaggtgcgcaagatgcgcaagggagtagatactaaccagaatatcgtgacctatgattgaagattagcggggttttaatttggacatagacatatttagcgaacataccagggcaatcaacgaaactattttttttggatcaaaggttagcgtataccagataaaaggagggaccttcgggttggaggtagactagggattcgcgatacctgacatgacgctatatcataaaattagatgagggccacttgaggaaaggctctgagtttagacttcagaggggaggcagaagtacataccagcaactgataacgacctgtacatccctcgcgctcacatggcgggtcgacttccttctcactcttgaaactcttgtaacatgtagggcgagggcactcggggctgtcacacttgtagatcttcgcgttggcgtaaccaagcttaatggtaatattgcgctcaagctcgttcttgaagcggacggtttgaacctcagaaatagccttgacgacggtggatttgccgctgaaattatattagtatgtgtgtaggaagaaaaaggcgagagaaggtgtctaactgtgcgacatgtccgatcgtgcctggtaatcatgtcagtaaatttgttatctagtaaaataggtgcgtttctgaacgcgctttcaaagacgcattcacaaaccaacaatcacataccgatgttctgagtagcttgccgagcaatgatctcaggcgaaagaggtgtcaattttgacaagtcgagggtttccgggttaggctgctcgggcagttctgggcgcttcgggtggggagcagagtcagccttcttcatggcagacttgagaggcttctcctcctgctcgaggggctcctggtcctcaacctctccgcgagcgttgtgggcatcgagcaaaggtgagccgggctgggatccctcgtcagagaaatcgccgttggaagccatatttgcggaatgaaatagaaaatcaactcgcgatcagcagcaaagttgaatgaaaacgcaggtggtcggacgaagctggtggaacggtagaaggtggaaggtcggatgaaaattgcttcccgccgatatgataatggaagaatgtaggtgggggattgtgtgtagtggagagccgggcggtgtctagatggcaactctacattacctctacgttataacggttttagtaaatatgtatagagaatatagttcaattagacgtttgttcaagtcgtttaatatagtttaaagtgtcatggtttattgtgcgtgattcgttatcttctaagaaaaaatccctaactaatatacaactcacaccaggtacgccacatcggttttatagagcagtgagggatagttaacatactaaatcattcttattcgacttgaatttaaagaaagaactatttcaaaccataatcataattattttcttgggcaatagactcagcttcttttcatacatactcatgatacattggttgccactgaggatctatttgacggcacaaagggtataaaagtcggggagcaatgagaagttactcatcgtcactatcactcgatgactccacttcttcttcagagtcgtcttcggagtctatcagtgtagacggatcctccgcaggcaacatgacaaaggcagccaagcatgtgatgcggttaccagtctcattggtagtcaagagctttccaatctgagtcgtatccttctttccttgctttgctgcggaaacctctttcccagtaaccttccaaacacggacgactccgtcactgttgccggtaacgaccaagaagtcgttgcggaattcctttgcttgaccttcaagagtgaggatttcgaaatccttgatgcggccagggaacccagcttccttcccaccaacctgagcaacaggggtagcatgggaaattgagcattcggtatcatcctccgcttttttcagttctttggttgaatagaagatcactcggccatcctctgtagagacagccaagaaatcttccttttcaccacccttcaaaggcaaagaaacatacttcatctggtgaagtttgcttcgtgggctaggaagaagtctgcatctcggaatcgagtcctatgccaatagtcagaaatttgatcaacggtataccatccaaataacttacaatcccgaacacgactgcaccccattcgaaagcaacggcaaactcctctccttcggagtcccatgcaatgcgccggccttctccagtgctccatctcgactccttgacaccctgtaggacttcccgggtaaagttcaacacaccagccttcctgccggtcaccagattccacaatctcatacatttctctcctcgcccaacacttagcattagcttcatactggggtgaaccgcaaagtggttcactccagatggagcagctccgggaggcgctgtgtcaccgcttggccgtccttgaatttttgggtttggtgctttgatagttgatacaacggtccagtcacgggtcttggagacggaaattgtgttatcctctccggctgcgagtaacttggttcgcgaagggaaattcaacgaggttatactggcagtgtggtgcaacaatgatcctagctcacggttccggggattttcgaggatcttgtttccggcgaaggtcggcacggatggatagtcttcattcacggcaggtggtgcggcggagatcgaatacaagttgatgcgctcatctgtactaccactggccagcatcaccttttgggcatcgacagggtcggtgggcttaggtagtggcgacaatgctagacaacgaatggcagatccatgggcttcgaataagaaagtatccatgcattggatggctggagagtcagcctcagcctttgctttcaggctggaggctgggatcccgaccgtgaagccatggagcactcgctcataagagcccgtgacaacctggacagtgacagctgcatcgggagtctctgacggagtagggatggatttagtaaccttgggaggagtaccagccgtcttgtcgtccttggaggcgtcggttctcttgcgtttcaccatgattgctcaattaatgattgtggtttctgttatattgtagatgtgaaagcttggtctagagggcggacaactttttttcttttttctgccagatgtttatcggccgccttgataggaaatagattcatggcctgaatgcctcaccgccattaatatgaggtgtccaatatatatatgcctgaggcgtcacacacgcaagcggagtcagaacaatacggtgcgttaccagttgacgaagacagccttttttgaaacgcagaagtctctcacaaccatattctagtttaataagatagaaactattcttgcattctctaatagataataaacattattttttcattcatcatcaaagagaattcttttgaagtaccaggtacctggtcaagccgtgtattttttatagagggagtgagtaactggttgtacctaaaccaacatcttcccgttcttccacatttttcataccgccctgtaacctcattttcacccccttcgaaaagatcctgctctaggtgcttttcatcgcctcctaccctccacccatcagtttcatctttttcgagcgattttttccatctggatgacctcgctcgaccagttccccttgttcccgcgttaatcggatgctgcgttccgaagctagactccatgctccgtgacgagctcctacgatctaaaaacgatgagatcgcgtacgtattaatttttatcgcgacggaaattcgattgcgatgcctaaaaaacgatgaattcgtcgctaatttggtggttagaaactgtttgtcgcgcagaaagcgcaagctcagcgcattgtatctagccacggtcgggtttggcgcgaccgaggacgctcattaccaccagaaagaacaggccttccttgacgccaatgatctctccaagtaagtccagtcgctttgatactctactagtggggttcaatttgcatttatttattttggtttgtaatttctcaatgctgattccctatccagaggtcgttatttcgatgaagctactcttccaacgccagcccatgcgcgcgcgccctcaccaagtcgaaatgcgattcccccgacaacacctgccagcactagtgccgaacctgtcgccggggctactccacccttaacggtcgatggcgtagttccgaatgcgactgagcctcaacagcgcggaacgcccgttctagaccaacctcggaccgcgacacctaatctccctcctacccccgtggatacaaccggaacaaatcagctctcggtgccagcaatcagccctaagctgccaaaggacctcaacgtgccaccgatccatgtgcagtcactcgacgcatcgcgcctcgaccagaaatgtagtgtaccggtaacagaaacgccgcttagtgcctacgagcatgacgagaatcgagcaaagatatctccccgcgtgtcaaagctagctgctactggagttccatcactggagattccctccaaccctcttcgaaagaaaaacgaagcacgaccctctcttaccttgggaccatctcacgaccaaccaccgtcacccgcctcctccactgacccctacaataataatacacctgttcccgttgccgtatcacccgacacaagccccgcagaagaagttactgaggataatgggacaattgatcgcccggaacacaagcatgaccgatttgctcatgctcgcccgagcttggttcccttgaccccagatgagcaattgcgcctcgaagaagctcagtcgaaatctgataagcccttgaatgatgtggtcgccgacataccttcatcgaaagaggtgattgtggagagcgtggacaccggtgccgatacagatcgcatggatatcgaccaggaacctgctcccgtctcgtctgaagcgaaaccatcacaagaacctgggacgactgtgcaatactcgctgtcaccaaccgcacaggccgaggccactgcagattccgctgtcgagactcccgtggctaaaaagccttctatcccacctacgcaacctagctcagcgcaaccagagcgcatgacgactcgtgtatcatcgggagctatacgacacaagtctgtttcagagatcctcggagaaactcctaagagtacccctcatgatagaagccacgcagccaccccatctgatcaaggctcccctgattctgtcgcgagaatgcgcttcaaggaccggaaggagcgtgagaaggagagaagccgactatccactgttgtttttcccaagcagccaactcagcaggagaaagccgactctatggagctgacgcaccgagatatggatgcagttgccaagctgaatgaggagcaagactatcttttcacgttatttttgaacagagcatacgctcctccccgaggaacaaacctcaatactctgctggcgtctgcgcataagactttgagcactagcaatcatctgcttgaataccaagaacagatggattgccgtactctccggcgcatctatgctcttcagaatgccaatcgatggccattgcgacaattaaaacgctccgttgaacctcctcgccagggaacacattgggacgttgttttagatcatatgaagtggatgcgaaccgacttccgggaggagagaaagtggaagattgctgctgcaaagagttgtgccgattggtgcgcagaatatgtcaacagcgacgtggaacatcgcaccttacttcgtgttcaagcaaagattccagcgtcaactctggcggaaaaaaatccctctaaggctggtctcagcccatcttccgacgttggtgatgaaatgtttggtgtttctcaccccactccagatctcatcccatccgccgaagaggaatcagtcagtgatggattcaatgatgagcctcggcatgatattcacgacaccgtcgctcctgctgctattttctccttgggctcggatgagttcaacttctcaattgacatgacccccgccgctgaaaagctgttggaggaactgccaatatatggaccactccaaatcccccaaggcacgaacacaccggtattcaaagtctcccctgacgcagtttggaaaacggaactgctaccagtgtcgaaatttgcatcggcgaagattagcttccacgatgacgagcgtcctcgcaaacggagtcgatatgattactcccagtatggcaatgatgcggacaatcgcatcaccgaattggcacctgagcagacaaatgtcgcgctgttccgaccagagaacaagcccattcgtgatcggattcaccctggtcatcaattccggcctccgactgaacaccccatgccttctgttggtttctttgaatcacgttcgtcctcacaatggacttacggtgaggatgatgaactccgacgcttggtcaaggagtactcttacaactggtctctaatttccagctgtcttaccccatcgtcgctcttcacctctggcgccgagagacggactccttgggaatgtttcgaacgatgggtaggactggaaggtcttcctgcagatatgtccaaaactcaatacttccgagcatatcaccagaggcttgagactgcccagcgcactgttttggcccagcaacaggctgcccagcaacagcagcaacaacaacagcagcagcaaggcgtcaacgctccacctcagccacctgtccgccggaggactactcagcctcttcgggttgaccggagacgatcttcgaagcatcttgctctgcttgatgccatgcgaaagctggccaagaagcgagaaactatgcttcagaaacagcagcatggtatgtttgaaatagacgcaggtcaccttgtgccaagaactccactgacatttcatctcttagcttcccatctcgcttcattgcgaaaagccaatgaggctaaccagcccaagcctccgatctcgtctccggctgagttcagccggttgaagtacgacagagagatgaagctgcaggaaaggcaggaacagtaccgccagcaaatgattgcgcagcaaagagtaagtggttgttaacgtccctacctgacagcactgtggcttaccccccatataggctactctcgccgcgcagcgttccggccaattacctaaccagcagcaaatgatgaatgtgccggggcgtaacaacaccatgcccccaacttccaaccctagcctacccagtgggactccgaatggaatgacaaatggcatgccctctagtgccggtgtcaatcaagcccgcccccttccaatgcagaacatgcccaatggcgcacagcccaatggccagatgcctaatggaatggccatgaagatgatgccgcaagctcaaatgcaacaaacaccaggggcacggccaggcctgccaatgcaagcctctcctgataacacgcgcgtgattcgagaagccaatcggttgcaggagcagcagcgtcttctccagtctcggcaacagcagcagcaccctcagcagggccagcaattccacaacccgcaatttgggtctcagggatcgccgaatatgagcatgccgaatgttaatggtcctcctaataaccctgctatgatggctgccctccagaaccaagggggaatgcagagtccgtcgttccatggtagtacaccacaaggcgtctccacgccatcacctcgtatgggtcagcccaatcctctttcgagcggtgttgttcctcaaatcagcactctccaaagccagattcaacgcacgaacccgaatatgccccccgagcaagtgaccaagctggccacggatcgactcaaccagtatcagcaacagcaacagcaacgcttgtcccaacaagcagcgatgaatgctgctgcaggtagcatcaacgcaaactccgttcaggccaactaccaagttccccacgaggctagtttccagactccgaacggtggttctgcaatgcaggtccctcaaaaccaagggttctctccaatgatgcgggttccccagcccgttcaacagaaccgcgtcggcccgactagctcacccgccatgaacggtagtgcgcccctgcccagccgtagcgccactcctcaaaaccagcgcagcggcagtgcccaagctggcgccgttcaaggttccaacaagagcccacacgctccggcagcccagaccgcgaccagctaggagcttacatgtcctccctgcaatacacttgcaaatcctttattcctccccacattaccttcatctgtacatacttacaccaacccttacgctgatttattttctacactttgtctttcaccgttgactcggattcttgcgctacaccaacacctaaacctcccccatttgttgacctctaccgcatgcgtgctctctatttttgcttggctttttgaaaaggatgttcatcatttatttgaacttcatatgcactggctctttttcaccaagtgctgctctgaattctgaattccgggctttggtttgtatcattgggaataggcgaaactggggcggacgaattactctaggaattgagatgaattgtatgattagttaggatttttttttcccaccatatttctatgtagtttaatttcaatttgtagctctgagagttataccactgatagcgccaaaccccgtccttccacctgtctcgccgactacttgcagtcctcatttatatgacttgcttttctaattacttggccagaccctcatgtgagctcccaattttatttgtgaagacatcaaggagcgagttgaaattagaacttatccagagagaactttgactaaactacatcccgtcaaagacgtattgatccaaaactagactatttcctattcaagtgaggatataacacacaaagtaaggaaagtataggtttattgtgcctgtatctcttggctactctcaatcttgatttgagacaaccctgcgaactagccctggggatttctgaatattgcaatatgaatactccgaacgaaagcgaaattcaaatagaaacaaccgactgacccaatgacttacttcacttgtcttgtctggccaacgaccaatccaataccctaggtggtttgggaactggtttctttttggcacgctttggcttcttcttttcatacatcaaccacccggacaccggctgaatcgaatcaagtccaggttgcctagtgggaatggccgcgttacagcgcttcatctgttagttatttcccacgaaatatagaagggttcgccggtaatcatggcctccagaaccatctagcatcgctccactcgaagtggcttgtatgccgatcaacccggccaacatcacagcgtcgaattcgtgtccaagattattaactagaaccggcacagagacatagcccagagggactttctctgtgtctacgcagcgtgacaaagcctcatcaagaccgaacttcgtgtctcgtatcttaaagtcttgcgaggatactggaaagattgactctgggtgaagcaactttccatcattactccagaaacaaaagaccgatatccagcctgtcagataggttggcctgctagccccgcctcttctgtccgcacatttgctccagaagctcagtacatccggtgcttcagggttgtcgaaggcagcaacgaagttgttaagaaccggtcgaagaagctgagcaaatcgagcaggctcatcccctaggtgagctagctgatcaagcttcgttgccataagtgcccagtcctcacgctggccgagtaaagtgacagacggaattccgcaccggatggtaaattggtatgagaaatacttctgtgtagagcctatcatcaatatagctgccaccacctcatcggatgcagtcgtggtactaaaggctggcataatccagttccgtagctccggattcacaatatgctcttccattagtttggtcatatccaacgccatttcaccaaagtccacagtgtccatggcatcatttgtgataatgtttaggtgtactgaatccttacgcgagacgaatagatgtcgcagttcctcggaatgtgctactatgaagaaactgagctgcgacagaatggtaaaccaaacatcttcgggccggagtataaggttgtggtgatgactatatgcgttgaacacggcccagacgaagccattttcggatgcggagatgtgggatgtgtccaagaagtctttggcaaatgagttcccgatcaactttttgccgtcgctatgctcttttggacaggatttttcgaagagctcttcgaccttggctatcctctggagtccccatgcacgcggtggatttttggttgttgtaaaagtaataggcaatttgtcgttgcggaggatgaagcttaaaggatcgaaaggaatcagagaaaataggtcgagtacttacttactaacctagagcataagaacgaataactacgtaaccttttaaaatctactccgtagattaatgcagtattctataaacaaccgagttattgcgtattctagcttctagtatctcccaaatggtaagaagttgacgaagtattctactctctttatttcctagaggcaagcagtgaaagatcactgaccgagagcagatcgctgatgttcgtactgccatctttcgctaataccgaacgttcgctctcttctagatgccgtagaagctttttgatgctttctgcccggccacttacatgcaggatgttgccaacggcagcatgcagctgtaggtactggacttcaggaagaggaaagcgaccgtcgtgactagtcaatgtgacaatcctgtcttcgtaatagtataccgaaatctatctcgccgaagacagtttcggctaagtcgctcttgttcagttcgaattcctggtgtgataagggagttgaggtcttcaaccgaatcgtcaaagctaatatggggggaggaagtgataacaggccgtcttcccactcgtagacagaagaggacccagcatcaatgctggcagctagttggccgagttcatcatcgttgtggcagccggaacatcctctgacaaattgacctgcccatccgaggggaggtatttgaagcaagtctcaaggaatttcttcgtatcggtgttgagcgcttggtagcttgcgagggtcgcctcccaaggctaattttgcctcggcataggtagagaagccgacggatgaaacagcagggctgagactactactatcatcttgcgacagcgacattgtgcgcgacaggtggcaagggaccttatatagtctgccacatggatagtggggtggtcgtggcgggtgaggattggggcgagccgcactcctagccaatgatcctcatcgctacctgagatctaccggttttgttggttttcagagccttctggcgagtacaccatattcagactgaaaagagagtaagaaagtgatgagggctgagtgacgtgagatggcttgaaagagtaaaaggtaatgccattgtggacgtaagagagatatcaggcgtctcttttgatgtcttttttgatgtctttctgtgtgttttctggaaatcttttccccatgtcaccatagccagaagagtacggagtaagaggtgctgagtcctgactttttgatgtctgttttcacctactggcaaaatcgaagtgcataaggcggtgagatcgtcgtccaggcagtgggcggtcaaggggccagctggacagcattccgccaggcaaatattcaccaataagagacttagcacggcgggcggtatagcagttcagaaggcggtagcacaggtgttaaaacattcctagcgcaccgccgtctataccaatttagccgcgcgcctccaattttgccaccgcccatgagctagtatcaattgctcctcgaggtcttgcttccctattaagcactccatttgtttcaaatcaaagtaccatcgcaatgtctacgtgcgacaataatgagggcggaaaaccgccctccaaaccaatctctatatctttatctagttcaaagggtccttcgaaaaagaccggtttcaacctccaatcctcaaatcgcggccgttccacaacttctacaacaaacggccagtcactgcctcggcgacctcaccagctcggcgacgctgatgagtccgacgaagatgaagcccccccggtccacgaggaaatctcaggattcgacattcacacaggcgtcgccattgccgcggacggacagacagtaacgggtgcgaagaagccactgatcatccccgtcacgagcaagaacaactggcgcgaccgggcgggagtcaatgtgaagaaaggcaagaagaatttgctgcctagcgaggtacaggctatgcaggaagcgcaaaagaacggacaagcaccccccggagtgcccacagtagagacagatacgcccagcgtggcgtacgggttgagctatgcacagcagtcagcagaccaggcagttactggcgcagcactgaacgaagaccaggccatgcctgatgcgaaacccgtcgagaccaagcctctcaccgacgaccagattgctatgcaggcgctgattcgagaaaccaacggggaggtagaacgtaggtcagaccttgtgattgagtctgctacaaaggacgaagaaccagttcactacagcgagctcggatccttccgaacagatgtggcatcccggcccgagcctgctactttggacgcctacaatgccattcccgtcgaggaattcggcgccgcgctattacgaggaatgggctggaaggaaggtcaaactatcggacgaggaaactacagcagtgccacagctgcagacaaggcgaaaaacccccgtgttccagaacgacgacctgggttcctcggcattggcgcgaaggattcatccggcggtaagggagctgaaaccgagctaggagcttggggaaagtcggctatgcgcaaggcgtcaaggaaacagggggaggagaacgataaggccgagggtgtgtacatgcctatcacgatgcggaataagaaaaccggcgagcatctcaccgaagcggaactcgctgcgctacaaaaggaggccaagtccaagcctcccaaggaagacgattggcgcgagcgacgggatcgcaaccttgagaagagcggtcgggacaaggatggagaccgggaataccgcaaacgcgactacgacgatgaggaggatcgttctcgccggaagactgggtcctcgcgacgtgaccgtgaccgcagtcggtctagtggccgccaatcttctagccgttcctctcgatataacgatgacgataaaagcagacgggatgaccgttcctatcgggatcgagaccacggccgggaccgtcggcgggaccgtgatgatgataaggacgatcgaaggagagacggagagcgagagagagacaaggaccgcagccatcgatctcgagatgagagatacagcagctcgcggcactcgtctcactcatcacggaacgacagagaccgagaccgagatcgtgatcgcgactctcgtcgaagccatcgcgatgattaggggctagattttttggcgaaagattaagggtattgaggcctttgtacacgaccaattgctgtttctttggagatacatattccctccatctagttattttaccatgagactcaaccaaaagagataccctgaacagtcaaatcaaaatatatatggctttggccaaagaacactttccatgatacactgttcaattctataaagagatggcttttatccttcccacccatggtactccaagaacgaaagcgccaaattcaatgtacaaacggggcaaaaggctaaagccagactatgcttccaacataataacgtccttctcatgctctccctcgtcgctgacattgcccacagtcaaatcacgaagaccaccaagtccaacgccaccatccatctcaccgagaacccactcaaccaggtagctgtcatcgaccagctcctcaactcgccggtagtgcctctcagtgtacgcagccagcgcctggagaatatccttcagaccagccgcggcacgaccctccttcccgcggacggactgggtcgcaagctccacgaaagtggacgcggggtaagagcggaacagagcatacaaaatgcgctgtgacacgcgcgaggtgcgtgcattggtgttccagtcccggagacggagcaggagagtgcgcagattggcagggtccaagttctgcaggacctcatcgatggacgggttaccggacagactggccgcagagcgctcgcggtcctcggccgggagggttgggtcgtctgcggtgttgatggcggaggtgaagagcgagagcaatctacccgggtggttgagttgcagggccagggtgatggcttcacggtaggcaccggcgcggatgtagttctgcagttcttggtcctgttcgacgcgagcagaactggcgttgacagcggctgtgtaggtggatgatgtcgtatcagtccagaaggtcactgttgcgtcggcagaaccggaggcaagggcgtagggagtggtgttgaacttggaggagattggcttcacgtctgcgcgtgagccggacggagttgggctggctagcgcccagactcggtcgatgtggttgtctagggtggtttcgagttcgcctgtgtagggggaccatatcttgaccagaccgtctgcggccgcggaggcgataaggggatggtcttgggtggcgtttttgcgtgctgttgtggcctcttcgtcatcctcgtcatcatcggtttggttgttcgagacctgcgggggtgggagccagaggactttgagaacactgttggtatgaccctcgaaagtcaagagacagctgtagtcagacagactccacagtttgacggtcttgtcaccagagcctgtgactgctaggccacggcttgtgctagtacgtgaatctgagttgatgatcggtgtgccctgcggggcgaatcgcaccgaccaaacacctcgcttatggccacggaggacaccaaccgacgagccttcgtcggcggcccagatcttcacggtgcgatcttgtgatgctgaggcaaatagctcggacgtagaatcgacatcaatagcattaatatctttttcgtgagccttgcgagtatagacggccttaggatagtgtggcttttcttctgtcagtggagctaacttgcttgtatcccatcgcttgattgtgcgatcttgcgagccagtgattaaaaatgctggtgggtggttcaaggggtcgttatatgcggcactgccaacaggaggtggcacacgcggcaaggcgattgctcccaacgattcggcgtggccagtgaatatagcaaagcaagtataagaggatgtctttgggtcaatacgccaaagacgggctgtattgtctttggcaccagttgctagccagtgtcctgaccaatctgcatcaatgcaaatgataatatcgtcgtggccttccaggtgtgtgacatcagcaccgaaatactcctctccctgatttgagggtcggtcttccgagggagcaaccgaaactacacgaatgctctcggtgttggtggccaaagcaagcatagatcgatcaggcccaatgtaagccagatcaatgatctcgtcgtcattgccggaaatacggcggataatcgccaaaggcttcaaagttgaccctggcttataatcagacagcgactcgagcgagtggagccgaagagtctgatccgcatgaactgtaaggacaaaaggcaaaccaggggaatactggatagcgacgacgctttcgaactcctcgccagcctcttgttcctctgtgatctcacttccacgattgcagtcccaaactcgcaatttgccattttctccacctataacgcacagactgctatccgcaatgaaagccgcagcttccacgctctccaaaacaggaatgattctgcgagtcttccaagtacgcgcatcccagacgatgacagtcttgtctcggctggccgagatcaatgcgttctctgacggagaaaaggacaaactgcggacaagtgaaacatgtgactcgagcgacgcaatggactttctcttgtgcagatcccatacacgcattttgccatcttcactgccagatgctaggcggaatcctgcagtagagcccgtacgggcggagctttccatatcttcatcatcatcctccgcagcttgttgcttagacttgttctttttggatgacttcgcatcgctgtcggcagtaggaacctcgaaaaagcaaagcgcagaaatgacaccaccgtgaccatggaaagtgtgagtgacaaaaccacctctgatatcccagaccttgattgagccatcagcaccaccagtggcaagcagtgtaccagtaggatcaacagcaatggtcacgacgggagctgtgtgaggcttaagggttcggagaagttttgcttcaatggtctgggaagtctcgtcaaaagttgagaggccgtagattcgcatggacatcgagcgcgagcagacaatagcgtgtgaggcggaaggcgtgactaggcgaattgttagtgcgctattctcaattctcaaggcatagaatacttactggccaaacctgtgacaatttctccatcctgtagcgattatgtggttagcgctttgcaattgacgaatatcccaaggcgacaaaacatactccttccaggctagcaagctggttgccagtctccaaatcgacgatcaatgcatcttcgcccacgcagctcagcaagatgcgcccactggcatccagcgcagtgctaccgccggtgtaaatggggcggagcgtacgggacgcctcgaaagtggttttgacgatagctttcgacatgactctgtaatatatcggcgtaaaaaagcagaatttagcacgccattggccagtcgaagagccgtagagattgaacgatcgcaaaaaactgcagctcgagcgggcaactttttttaatgtttgcactgtttgtttggtgataagatacggcttctgcctcaggccaagggcagccgcataaccacagtaaccacatgctcaactgctggtgtttgtctgattgtgcttcatcgcctattacctttacatctacgggttccggcaagttttgcacaaatggtgtactagaaggcgatgtgactacaccactagcccagtgaccttgcacgacatgggtagacaggcttatttgaaccggctcgcattggtaagcttcatgttttactcaccagcttttcctatatttgcagttgggaaatcttgggtctatgggctgtaatccaacttgtttcagttcgagaactttatggctttctgaaaccgaaccagtcaccacccggccttgtctctttgttttatcctgatatacaagcccatcccaaacgcatcttcccatacacgcagaataatgcctagttacaaccggatagtataccatattgactgattttaagggccggtccccatacgaacctcccgacaatgcggcggttgacccctccaatccagttcgacggatttccaacgtccatgcagacaattatatgcagcaatatgatactcgagggcaccctgttaatcccgagtctagaaccctcggaagagaactccgaagagcaaagaatgacatcctttcaacaatggggattgtcgtcagtggagaagaccgaaactctagcatccccaatgaacaacaaaagatcaaccagattgcgagtgaaaatgacttcgggctggtcataacaactctcgatcaactgttcatctttttcggtacctggtggacctcttcagtcaccggtcgagtacaggtaaatgcaccaagtaccttaggtgttgattgggctgacattagagacttgatgttcagacttaccgacattatgcccattccgcattagtcagtgtcgtacagtctgagagagacaccgcagggattcttagcttctatttttcgggaattcctgcctgggcaatgtccagtgggttggctatagctcgtgaaaccccgatgaaacgggtgtttgtctctctccgggactacgttcaatctttgacaggcgactcactcggtgttcgttctcttttcggggttttttatacagcgtgagtatctcattcgcccgttcgaataggaaacacaactgattacgaataaagggcgagaaatgctgtgctcatattgtctatggagttctacatgtactccacacttcaatccctttcccttgtatccccatatggaattcctggcgtgcaattcctgcttcccttcagcggagaatccttgctacagctgccacccttgcccactgatttctcccctcagtcaatggtgacctcactcgtgaaattgttgctctcccctggcgctttagtgtttctctatggctactacctgcgaccagagcttgaagagcgcatatatcggttgatcagacgacaccttccgaagccagctcttcctgatgaactttcagtccgcgttgcctttgaagaaaatctgatcgagtgggtagtgcccaccctgggccgcagatcagtcgaagaattacaccgcggcaagctcacactatttgaagacatcaagcttgaactgtccatgcttcgaatatgggtatcatcgctttttagaccgagatctacccaaacgttagagcagcaagctctcttgtcctttagagacgaaaggattcaaaatctacgcaacacgattgagctgttgcgacatgaactcggagaagacaaccttgtttccgatgcaggaccaaatgatcccgtgcctagaccgccggggattactcctaatgcccaggttgccgctcttgcatcacgagcacgaccacggccgcaggatgcaacgcatttgactcaggcagaatcagttattgggctgaatcaagtgcttattaacgaagatcgtatgtctcaatcgcctggggaaatgagcaatgactatttctccgagatagctactgctggacgaacgagtcttctctcggccacttcaaccccgcaggaccaaacagcccctttgcaaaatggtgaggaatttgctatggaccgacagaactcgcggtctaatactctcttctctcacccatcatcaccagaaacatcacctcctacgtcgcctcgcgtaagagcatccttgattcaccagagctccgaagttatcacgatgcagcttgagttgatgggcaatcggaaccatcagccccagacccaagctttaaatcccgcccagctgaatggactggcacgaaatgatatgtcagggtcaaatacaactccagatgccatggacagacgatccatagccgagttcctcgaggctctgatcttaagtcaggcccagcgtcaggtccatcagcccccggcagatacggacggcctctcaaataccaactccgggccatccaacacaaccccccaagacttaggtgcctctggattagaccctcaaaatccggccccagaaactcaagccaccaacgctccagctttagagtcaatcgagggagcattaggatccatcgttcagaacattctcccagatggcgtggaagaaccaaatgacgaagagccctccaatgaatcaaaccctgtcccagataatgaagacactcaatccgacaaccccgtccagccagtcctaccctcttctttgattcctggacaaccgacaaacacatcgtcgcaagtccaccgcgtcacccttctttcggcatacccagtggactcactcgcatctcatctcgctgctgcaatcagcggcatcatactcgcgccacttgaagcactataccttcgctcattgacccgatcctggattatctcacatccttcctccatcacccgtctctcagatgtccatccgctgggtctttggtttggcggaagaacttggccagatatgtatgcttattcctgccgactcgtgctcatgaggggaatgcaaattgcgatgagagcgggtatatgggggttccttgtgggctcgacaatgaggattgggaggaagttctgcggctggggaaccctgtgatgaacccttgtttctttaagccgcctagatacctaggtcactctaccatgtttcctctattttctcgcactctgtatcttaaccataatattactttaatccatatgcaacatgataggttgatagttgtttccatcagtcaggctgaaaaatttagtaccaatgtgttgtatttcttttgtcttctgatgcagcatttgcgtctactttaccgaacgaacagtcgaagatatcaaaaaaaaaaacaaaaacaaaaacataatttcgtcattatttgagggtacattgcatttgctctcaaaagatacatgtaaacacgtagaaggcaatagcaagttcgcagcccgagccaactcctcagataaccatctcagatcatgcacgcccctttcctttgttccctggcaccttacgccgctcccaaaccataagatatccctcacgggcgaacagcgtctcgctttccgcgcgcttgacgaacaaatcctgaatctcaagccactctggaccctgctgctgcttctctgtggaaccgccatttttggcgcgagtgttctcagcctccatagctttatcgtgaagttggacaagccatgacaccttctcgctgccgccacctgctccactggaggaaccgccggctcctgacgcagagttaacacccttttccacagcgtcatccattgcaccgggtgcggcgatagcaggatcgaggatgatgtttgcgacaagatcatagaggattggatcacttggtgaacaaacatttggatttggctcgacatagggggacatatccaaggagtgcggagagggaaaggtgacaatggttgggtttcgctcagagacaaaacggttcttgctgaagcgcttgatatggaagaaaaggtaaggaggaagagggtggaggagacggtgtcggacacggtgagccagtttctctgacgccgtgtagccgttatatttgttcaggagggtagtcaagggaacctgtgggatgatcgactcccgattggcagattggaagagaggtgtggggggtaggtccagtgtgagaatgaggaaaggagtaacctggctattgattatgccagattcagtgaataccaaacgggcattttgggtgtcagagtgagcggtgatagcttggctttcgatccgtacacgaccctgaaatgctgcgtgaacaacacttgtgggtgttggtgagggcttcttggatcctcctaaggcgaggtgcaggcagttcaaaaaccaggacaagaagtccacaggatctgcctggttcgtgagagtgaaacgtttcgaggatcgtacggcaatctcctgtagtaactcgtgcggagacacatgtgaccggaacgctttagggttccatagcttgcgcaccagcgtgctgaaacgaagaattatctctggtgtgcctggtgtggggaactcgtggagcagaaagaaattgcgaattggcaaaacatgtgccagtagttgagcgactacattgacgtagtcgttggctttgatgttgttcataccgacaaaccctgaaaagagacaattagctaaaagagtacttttccgtcctataatggtagatgctcttacctggtctgtactttgaccctgaaaggtcccaggcatcatgcacttccttatcgagtttgaccacttggttttttgtgtagtgtggatcaaccacatacttgatatcatccaaactcttgttgttgacctcgtatccttcaggcaaaacgtagaccttcttcgtgccgatgttgatgaagacgtggtgtccaacttcaagggcgtgaaaatatgcatgcgatttcggaccacgaccctggaagtatttgccgcagacgaggcatgcgtacacattgatgtttgacaaagtgacggagcacagcttctcgaaatcgaagtccaaaatttcgcggttgatcgtgtcgaggtagaggtcgccgtagccttccatgggagcgctttgccgcttcggagcgctgagtgcaggtgcatcttcgtcaatatccgagagtccaaggggattttcgccctcctcaagctcctctctttctatttcagctgctccttcgatatccacgccattgagatcgtcctgtgtcaactcttcgccgctcgtgcggtatgcgggcactgcgccgttgcgagaatcggggtcgttgccctcctcgacgcgcgcccttttcaaaacaggcgagccagaggaatcttgctccaaggggagctctgcgtgtcttttcgacattgtgagatggtttggatcgaaaagttggtgatcccggggttctggactttccgatagctcgggatgcgactgcgttgcaaacaagtcaaacacccaggccaatgccaagctgtgtacgttctactccgtatacaaactactgttcattttgattataggactgtatttgcctattacttatccaagattatctaggaatctactccttacttgacctccgagcttgctacagcctaaatcatgccgaccgttggattatcccggaatcaaagaaaaacgtcgtaagatgtgatacaacaaaccccgtcgtttgtcgaccttcaagcactccggaccaccttatcattatccacggggacttcttgcacgccatcctttgtcacgaccttcactagcatctgtagataattgtgtcagaataacggatttgctcatggcgtttgaaagaacttacccccttgtagtcaaagggtagtcggcgcttcagctcgtctgtgcacagggtgaggagcgcaaggccctcctcgagggagcagtcgggatggtgatgtttgtcaaggatggagaggcagtagtatctagcgaagtcagcatcagtgatctcttgcctggagtttcgtccgtcatagcaggccatgaaacatactgggcatagccgtgggcagcatatggtaggggcgccagcgacgctaggtaatcaatccagtacaggtgaggcttctcagtgaccggatctataccacctagcagcaggtttactgtgtagggactccgtgaccgcaagctgcgcgccaattctccacggacgaaattggcaacggcggagggactgagctcagtatcattgcgcatgctgtagagtgcagcgttggcttggatgtattcggcaaattgaactaacataggtatatcattagcatcttgtttgtctcatcggagaagctacataccggtatctccagactcgccagagaaagccatcaatgtgttcttgttcaactgtcgtgtcttatcatcctcagccttcagaactgtcgggcctctcattgcagccttggatgcagcaagaatgacgaagtccttgccggcgatacccaaaagaacctccctagcaaactgttagtgacgttttgtatcgacgagatgaccataaacttacatgtttgcggtatgagagataaaagaagaattacaagcaagcagatgatcagagaaggcgaaggggagtagtggtcaagtgaggaggaccgcgcggtgagcttgacgcctggagctcccgtgaggtcagctacccgctgagtcagccgccgcttagcgcttttttttctgccaaaaaaaagttgaagttttgatctccgcagtccgagtctttcgagaacgccatagattcaatttctttatacagagatcaagcaccgacaggcttgacaaaagtcgccatgtcgtccttttttactgtacccaattcccagcgcaagaggaagagagacgaccgcgccggagccccaggatcaaaaaagcgaggcgtagatgccaaaaccgacggtggtcgacgcaccaaagacagagaggaatcgatctcgggcagtgacttggacgaggatgccgcaattgatacagcagagtcaggagacgagagtggatcggactctgaagatggcgagaccgcggcggatcgaagattgaaactcgctgaacgctacctgagtaacatccaagaagaagtcgacgaagctggatttgatgccgcggatatcgaccgagacttgattgcggaacgattgaagaaggacgtcgacgaatttaaaggacggacgttccgtcaaatcgcagcgaaactatccgttcccacggcgccccattcctttttccgctcagatacccagtcaaacaccgctatcgcagtccacccgccatttgtttacattgtttccaaagataaaactttgaccaagtgggaattggctacacccagtgtaccagactctacagaattgaacggcgataatgatacttccaagcgggctccgcgcccccagcgcaagaagcccaagcgtgtgaagtacgctcggggtatgcgcaaagttggcgaatcaggcgaggatcaaggacatacaggaagcatcatatctgttgctgtctcgccttctggaaaattcttggccaccggtggaacggacaataagcttatcatctgggatgcagagactttgacgccaagcaagacctttttgcaccacagggactcggtttgcagcttgtcttttgcacgccatatctcggcgatgagttctggagagcagttgttctccggttcgtacgaccgcacaattaagacatggtccatcagcggagctggccacgcgtatgtcgaaacgctcttcggccaccaggatcatgtcaccggagttgctgccatgaccattgacgaatgtatcagtgttggtgctcgggatcgtaccgcccgcttatggaaggttgtcgaggaaacacagctcgtgttccggggcggcgcctccagaaatgccccttaccacgagagcaacatcgactgtattgcccccctcccacccactcacttcgtcactggctcagattccggctccctctgcctttggtctgtccacaagaagaagccactctacaccgttcgtcttgctcacggcttggacccgatcccccctctggatgtgttatcacccgagttagacgaggcgactgccgcccacaacacgcgccacatgcgcccaatgcctcgctggatcactgcactcgctactctaccgggtacagacgttgtcctcagtggcagctgggatggtttcatccgcgcatggcgcgtctcagaagataaaaagacacttatcgctctgggacccatcggtgcaggcttacccggtaccgtgacaccaacagacatgccctcgcagcaactcaaacagaccctggctcttgataccacccctgtggctgatcaaaaggagccagagccattgatcaagggtgtcatcaacggcatcgcggtctttgaacgacgccctgaatccgatatgcctggagctgaaataaaaaagtccgagaccgagcacgaacctcgtggtttgtccatcatcgccgctgtcggcaaggaacaccgattggctcgctggaagtgcttcaccaacaatttctacgagggcgccacttcgggaggccgcaatggggctgttgtcttcgaagttccgtttgctactaatgacaccgtgaaggctgatgtataaattttgttcataatcttcttgtctcgatcttggtcattggccgaggataaaatggggagcgttgctcggggtcaggtgtatttggagtcacatctgtgtattttaccattttgcatatgtatcgaatttcttcggtgcattgaagtatttcaatcatatccccctttcaagcaacattgtccctgaagtttacacttcgtgattagggtaaacgatctgaaaaggtgcataggtacccgtttataaccttgcttccctccaatattgcaacgtgcgttatttcaacaaccgataaccaaagactcctacgacttgcctccgtgatgttgagatgtttgctggccgtgcttgtcagtttacttcgcttgtggatagggtatccaccaggtgggtcagtggtaaatctatttgtctactctggatggactcgtggactgttgtagggacatgtggttatcaaagcaatatgagcaataacaatactcagcaagccagtaagctttattaattcggcgagggattagaatatgagaatcaaggatttaatacggtaaagcccggtgtctttttcataaactttgtggtcactcttcagttagtgccaagagactaggttcgtcgacttcactgggaaagggcgacaaaagatcaagatcgaaccgaagacggataagtaggggtattgtattcgtggaatatggccgagccaataagaaacgaaacatgaagggtccagccattgaaggcagcagaagagaaaaaagaaagagaaaaagtcgcccttttgatatcaaaatgaagacaaaacgccagccatgtccactctcctgttatcattacccaagcgccgcgctgaagtcaaaaggaaacattaagtaggccgatgaaatgcgaaagcagatgccgcgtcggcggttggaagatttttttaatatggagagaatctggcccgtcgcctctgtgtagctcttctcactgggccgacaggctgatcttcgtcggagtcatcgacggggatcgcattgtgagcagtggtcccatgtgggataggacggcgcgcaccgggtctagcaggcctaataggcggcgaagattcctcttcctcggatgagtccggaattgtttcaggtggaggcctcgctgcaagccatgaagcatcgttgggggctcggaaccgttgtggatattgtggattggcttgacgaggccgtgtagtctgaattacgtcttcgtcggattcatccgagtcttcatcgaccatctccctgtcgtccgaatcctctgagacttcctcttccacctcttcatcagaggaggcatcggcatcaaagtaaggtgtggtggttctgtaattgagcgcagtcggtattgaatggcggccaccctcagcatcatccacaacggtgcctgtggaacggtctgattccgattcatacatatcgccactcccgagatgatgggcttcgctttcaatgaacgaactcgtgggcagatggtcatcaatgaatgagtctgactcgtcatactcattctcctcctcctcttcttcttcgtcatcttcttcgtcgtattcacttccattggtgttacctgaagcgagatagttgtcatgattcactgggagcggcgggcccagtgggatcatgggaggtccatgtaacaagttctcaagccggtcgaaaagctgccggtcagcacctggatgccagttaggacgcctagggaaggtaggcccgtaatagtgaagcgcaaagttgccccagacgccatcctggtcttcaatctcatccaagtggtcagactcccctagctcgccatcgccctcgccctcgtcctcattctcgtcctcaccctcacccccatccataccatcatccatcgagtctaggtcggtctcactgtagtcggccgaatcactgtcatctgtctcagaatctggccgatactgatagccacatgatgcgcaatcgtatccttcaagttcccacgagcagtgtggacatcgaaccactccgtcttcggggtcaggtttgggtgggggatctttgggcttgaaaagacctccgaacagacctccttcggttggatgattgttggccttgtcctggtctagtctttctgcttcgtccttttggttttttgtatgctctgtagtcgtttctcctttgtctaaaagctcagctcgacctgtgaaaatctgcacaacggctcgaacctgtaacacgagagatatgtcagatacaatgaaatgattgaagattatcaaaactcaccagataagctggtgctggctgggttttgacgggtgcccggcaatccgggcatgttcgctttgatcttccaccagcaaaccatgacgatagacactatatgaagaattatggtcagcgaagagaattcacgacagaacaagtagaaaggactcactgagtagcagaaagtatgcccgcaagcgattgtaaacggttcgtaaaggggacggatgcatataccacactgtatcagagtgcgaatatcatcgacatggccttgaagagtgttgaccagctagattacgcgcgtgagtttttaggtcacttgaatcagatgcgggacttgtcttactcccgatgcctcagccccagaaccacttctagctgccattttgaccttctagggctcgtcgagagctgtggtttccacactaggagcgtggcccatcaaccgaagtgcgtttaaggcgtattggggtgatgcgcgtgtgtcaacaggtacggtgggggtcccggaaggtaaaagtttcgcgaagtggcaaggtgtgatcaacagattttcgcagagacgaacgctaggaaatcgaggaacacaggcgaggatagcgtgacggtctgagattgagagaaagacaccgggaagagcaataatatgatccagattctttaagtgagagggcaggtgttttgtggcctcaggcagccatcacataatcatgaggaagggggcggcgcttcgagctggcaactttggaagtgactcgtcactttcttttatcgatggtccttatgtgacagtcacttctttgggacttctggcgcttgtttaaaggttatttattgtgaaaatagtctgcgtgacaagtgcaactatacctctcttacaggtgagagacttttctatatgaatgaagcctcagcaggtcttataacacaaagatgttacccttgtcttgacttcctttttacctttattgttggtttgaaatcaggtgagccaatagataattatttctattcaataatatagctgatcgaagcatatatacctcacttgacatatacatctcgcaccaaccggtttactccctcgacagtctccgaggcactcacaaagactccatgcagcatcattcaagccgaagcctttgcttgaactcgaggccttttatatttttaacatctgattaacttggagagaacattcatttcatatcatatcattatccaagcgattgcctgcatctcttgagatcttcttgagtaaaaaccaacatacaacttcaatttcctgacgaagattaaagcactaaatcatgacccgaagccccaaacgaggcttgcaagaccaaaatgaacaatcatatcgttcaaaatcaatgatcatctcattgcgagctcttcagagccatatggccaagagcaggccaaatatttttcgctcccctagcactggtgtctactctgtatcttatatctttgcttctctgccgcatcatcaaggatccccaatgtatcttccttgctactcacggagaagttgatatggtcaatcgaagtctatggcagagacaaggtcaatatccgcattccttgagacaatgtccagagccttggggcttttgtatgcgtcataataaatggcgcacatctttgaatggtttcagcaccttatttcattgctaatcaatatggtgaattcactccgctgcgtatcccccccgcaattgatattgggacagactgctcgaatattcatacttctttcgcacctctgggttcaaaatcccctttatcatttgctggctagtgagaacagctcgggaacactaataaagtgtttgtgcattgctttttttcaacttccatatgatcatttatatgttgtagtgctcgtgaatatatatgtggagtataaactaggaagttgcattctaagaatggaaatgtaagctatttcagtggatccacaaatcagacataactagaagccatgtctatttagatacttcattctagacttgtatcaaacccaaagtattacataaaaacatggtgctagttatgcagacctcgggattctacatatggcagatctccgcgccaagactgcggatccccaattcttcttgcgtccagcgctaacttctgctccaatcaacctctacctccaatctgatcttcgagcaacgctttggcattctattctatttgactatatcatttacctaaagtgtccattgcaaagacaggagcaataagaactcattgcacccatggcggccgagtcaacacaaggagacactcacgacaaagcgtgggaaagagcggagaagaagttcgcacagtatgtttcaatctttcttccctcctctatacttgtttgtccattctcaaaacatgatctggcatgtctgaagccatccgtgatcgcgggatcatcttacacggactatggggtcttgagagccacgcatagcaacacaggctagcccggtggttgcatctattcatcgggctgaatacacgtggcttttatctatactggtagctaactagctaacttgcgatattagtaaaaatgctagcgagtactacgacccatgccaagacttcgcagatcggagtctaaagtgtatgaaacggaatgcctatgagcgcgaaatgtgccacgattatttccagtaagtcggtaattattctgcgatttaattaagactttgacttgctttccgtgcaatgtactggctttcgatccacttctggccagcttgtacaatattgtcatgattatcatatttgagctttcacactgactgatgaccttttctagagcttatcgtgattgcaaaaagaactgggtaagttgaatatgagacctttgccatcacctcagcaatctcccgtctcgggcaggctatccgcgagatccattaactttgattcgatatgcgttggagcatcttcggtcgctaacaaggcacagctcacccagaagaaagtttctgcaacgcctcagcccaaataagacatctctttcatctggaccatccttatcgaaaagatcgacaactcctgactggcaggatccctgacatccccgaagcagttgttgcatgccgatgcgtagggtgtgctcgttgattaattcaatattcagaagcctgtcaaagctaaactcctaccttttgttcaggtgataagcattagaattgctgtcgggcatcatgatattgctaggctggtaagaaattccattcctggcacgtcgaaacgcttcatcgtccggtgctgacttgtgagagaagcagtttctctattgaatttgctttcctgcttttgaatcgcatattgtactatcttttgaatgattttaagcttgtatattaacattttgctatggtcttgtctatttcgcacaggtgtagtgcttctgatcttcatattcggtcgagtacgactcgtgcagaatatgaaacataactccttatttatattcacaaggtagtcacctgctgtcatgtaaccaacaatttgttaacatgtcccggttgacgtccgtatagacttcctgggtttgttgtcttctaaactcttttcccctttcgtaatgacattagtactccatcttgacctcgctgctaaaagcctgattacgtcaaccatccgggatgtcacttcgtcgcctaggtatgatattgaactatcggtccacctggaatcaaatgaatgaataatggtatggatttctcaatgagtgtgaagataagaagcagaattccgcccgaccataccgctctctaagagagacgacagaacatcgaattcccccgatagaaatgatcctcttgatattctctggaagacagccattcttcctactcctccatctccattgatccggtcgaatatcttcaattcctgtcttcaaattgattgatccccttaagaccagcaatcaagagaaatcgaccccagtgatgtaacggaaggcttgttcatcaagcacaacatcttgcatgttaggatgtcggacaggaacgttgaatagagcacaatacggtaataccattggagcaccaacaactgtggtcttggtcacatcaacttcagtacataaatagtgctgctgcatgttaggcggcttttggaggaggggtggcattggattctggcggaggatgtcgatgtaggctttggtcaagggtcgaggggcaccgggcggagcaagctgccattgctcaaaatgtatagccgtcttcttgacagagatgagaatcacaatgcgcacttctccattagaggctctaaatctccattgagaatctttaagtagccttggtaggctctcagagacccccgtttcgataaccagggtaggccattgaaaatttgtactagaagggcaacgtgcagaggggctgaaaacttggtctccctctttgccccgtgataaggagttatatcgtgtcgctccgccctaataatattcattacttagtctcatgctgatcagttgcagagtgactctctgcacgagtgccgaagtggtgaattcatggcgatgccctggtatcacgcgtaaaatacctgtactaccttcaaactcaaaccggtagttcacacccttcaaacaatcatgatcctcgaagagtcgctccgagatgcgatgggttgtttggagtagaataagaactggtttccactctcttcctcgtctttttcgagggtctcggcgatcttctcggcctcgagctgaacatatttcagtcggctgaatgtgcgagtcacggcaccagatgggagcgctgtcatgatgtcaggcatggtacgggcgaaagagcatcggaggacatgatatcagaggaagaaattcccataaatatgggacgatggactccgacccagaattagatcgatggacttgtcatttctatttttgagatacatcatggcagtatggtgaggggaccgactgaccgcctaccctttggtcttcttccccaccaaataaaaagtgaccggagtcgatcagtccactccaactcagatcattgaacttttttagcccatgctgtgcttcgcacagtgatcagatcgttctgcgaaaaacgccaattgaagaatttccctgcacatcgagcaaaacctccaccatgagctccagcaatgacgcggtgtttctgcgtcgtaacaaccaaatccaagatgccattgactcccagaatatgaagcaggccttacagctgattgagaagcgcatgaagaaaggcgagaacactcatttcctgaaggcgagtgatttttatcattgtactccgaattcaccaccactacgacgtcgttaactgtaaagaaccaactaacacgtgagataacaggcctggaaagcgaatgttctcttcaaccatgcggatgtgacacataaaaagaagggaattgcagaaaccctcgagctgtgcaaggccgatccaccgatctcggatttagactctctcgacatactccacagtacgctgcgaaatatggatgactataccgagcttcggagcgctatatgggaacgagcagcgaaggcaaagccacaggatcgtgatcttcagatgaggtggttcaaattcggctatgaggctggtgattggaagtcagcccagaaagtgagttgagacgaagcatatgctacaccgggatcatatgaaggcctatgttgctaacgagtgcctcctttcttataacaggctgcaatgagtctccaaaagaactttcctcgggagcgaaagtattatttttgggccatcttcctctgttacctcgtttcggatgacaaatctagttcggacatggaccgcaagttgtttgggacacttgcctatcgccttgctcagaaagcagtagccgaggttccctctaacccggtatgtgacttttttccaagattgcatgtcactggaagtgaagacgaatgaaaattttggacataaatgactgactgattcaaatgatttactacagaccgaattgctaagccctccgagagcgatacaaaccgccgaggaacttctcttggttgttcgaattctcgaatcacagtctcgttgggcagagattgtgcaggttctcaatagtgaaaatactggtctcagctctcggattgttaataacgacaggaccttcatgttagccaaagtcactagcctgggggctgccgaactctgggaagaggggcactcatacgtcaaaggcctgcttaccgtgcctgaagacgaagcagagcgcaaaactttgcatgagcgggatgattggaaatactggaacttgctcatcctagccgtgcgtcgtcttgaaaaaagtccagggtatgtcttccaatatttttacttctacaccatcaaaccctcagctaataaatggttgcttggttcataggctactttccgatacgcagcagcatatcgagaagttcatcgaattcagcccaaagtcccgcaacgcgcacatcgctattatggacatagtcctaaccggattcaagcggggcgagcggacagaggatgatctggttattgcgtgccaaagatactttgaccaacacaagcacaaactctatgcttttaaagacttacgaggggtcttggagacccgtgatgatgccttgattcaccgagtagcccaaaattgcttggacagtgtcgaggggaaacctgtacgtgcaaattctgctaaactcagtcaatgcgagctaatcaaaattctaggatgatgccattccattaatcaatgcgtacaagctgcaatactgcgaccggatttcagccaataaaaacgtattgaaatccagtatcgagacccttgtccgcaattgcctttacttctacgatgcattcacgcttttagcaaagacacaggacaaaaaacaagaaagccaaccagatactgcttccgcgatggaaagccgacccacagatgacttctgcatcattgccgcaatggcccttcttcagcctaacacagctggccaagcatctgagaaagtcagtaacactgccctgattcgcgccgccgggattctggaacatcttttaatcgactcacctcataactacgaggcgattcttatgttgattcgaatctatcttcttctcggcgctggctctattgctttgaggtggtttggcaagctgtctatcaagcagatgcaatatgaaagtgttgctcataacctctttacccgctttgccaccatccaccctcatcccgcgcctcttatagagggcggagaatacaaggactttgacgcgcaagttgcattcattaccgctctcgacttttatcgtcatgcaagcttcactatcaagaactctttgataaaaggacttgatgatgggacttacgtgaatctagatgacacaattgagcttcaaaaacgtatcagggacagtatctgccggagaatgtgggcactggacttacgacggatgcaaagaatccgcaaaggaaaccacttggcccttcacgaggaaatcggtcagcaattctcagtctcccatgtactcctgacatacttgaatactaattaccctatagcccagaatacatcaccggctcaagaccagcggaagtacgatggtttcatggacctagaacgttgtggcaaacctgcatttgagcaccgactgcgcgcaggtccggttcctggggtaagtttgttggcttgagtgacaccatggcaccgactaatgtgcatataggaaaattggctggcgtccgcccggcttactgatcgacttttcagtgttcttgagagcatcggcagtcagaagccagtcgtcttggagccagagctgcctgacatcggcaaattatcgctctcccagactgatgttgatcacactggtgccgagatagatgcagccaagattcacgtagaattgttgaaagtggctatgtttatggctggatcgaaggcccatacttccaccgaaattgagactgttcttggcgagatagaggattggttgaaggctaagaaagaggatctagctctggaagatactggaaattctccccttatcatgaggacgaccgtccacttcagcccaggcaccccaggtgcaccgacatgggaatatttccataccatttggaccctcgtggagaccctcaaggctctatgtaatattttcaacctgaattctcgaaaggctgtgaagaccgccaaactccctgccgaacaaatgaacggactgaatactcttgttcgtgaagttttcgaggatatccgtttgaacacccgaagtctgaaacagagccttattgaatcagccactctcagtacactcattgatatggtcaagcgtggggatacaactgatgagtacgagaagccgcttcaagaagtcttggaaaaggcgatggacgagtctgcgctcgaattgttctgcggagaactgagagagagctgggaggaggcacttgacggagtgctggctgccaggctctaattctgaataaatcatgtgtctatgaaaatacattgttagagtacatgtaaaacaatccatgagagtgttgatatcaacaagttcagatgaagtccaggtagtaagaggttgatctataaaaggagggcaatatctatcacgtgcacatgtcaagccacatggacttagttgcctgaggtgtcagtaatgacgctagtcccgattaacccagccctagccctagtcactcgcctaccgcaccaacgccaaggctccattttgcggttccaggcaaaagaccaggcgaatttcacacggctctctcacctcctcttcgacaacctccgccaaccccttcagtcaacaaccgtcgagatggccgaacgctccggaattgtggtcggactcaacgcgggccgggtacgttcttactgtctctttgcaccatgtttgtcgctcgtttgaaggtctcccaaggtctcttcttttcgttcgctctgttggtcaacacaagatcagtcgggtcatggttcattgcggaatcactgggaaatcatcgcggcaagaaggattgcgaataaatcgccgaacgaagaatatcagagactcactgggaaaaatttcgatgtcacgggaacaatattttgaattcgactttggcaccggtgccagcactcgccatgcacgcaaccctgatccgaccacgctatgaaccaccccgacagacagacacgaaccgcgaattgaagagaacattgggacctgcggctgctacatgaaacttggcgaaacagacatactgactgggtcctgatatagaaaaccaccgccctcaacacccccaagacccgcatctcgcgcaccaagggcaagtcttcccgccgcaccgctttcgtccgcgaaatcgcccaggaggtcgttggtctcgctccctacgagcgccgcatcattgagttgctgcgcaacgcccaggataagcgtgcccgcaagctcgctaagaagcgcgtacgtctactctcaatccttttcccgcttttgtatggtcggctctgttgtacggattacattggatttgggggtcgatttggtcgaggtcttgctgtatacagaatggtactgtatgggccatgcatgtcaatcatgcagaggaagagtcatctcaacctctgcttggacaagcccgtgcaataactgttctgtttatagcgactaagattcatgcccaaacctaatgattccactattatcagagcctgtcgatccattgagtcgacacttttgctaacttcgtgtctagctcggtactttcggccgcggcaaggccaaggttgagtccatgcagaaggttattgctgagtctcgccgcaccgctgctcactaaatttccggacccgttcctgtttttctttcgttttaacgactcgacgcaaaaaaagcgtgattctcggatcggaaagggggcgtgcatgaaggggaaggcaactatgggattccttctctgtcgtatggagtgaaaccataatgaaaacaattattcaaccattttacgtgtgatatttgcaattgagccactttctaaatggaggtttacaacgtagatggagaagcgtatacctttggctcaagccgagtgaggtttgattccatgtaaatatggatgcagaggcgacaacatttcactacacatacaccattcatttggtgttaagcctagattttcattgaggttatctataaatgaagtatgaaaggcatgtgattctcaagtctatacgcacatctaagacgttaatgcgtctcgaagggatgcgccacatagttaagtcgtgaatcatcaagagcagcacatgtcgctcccctgaaccaaatacatttcattatcccctttcatttcttacccggtagcttcagccacttaggcatagcaccactcttccgtgccccgccggacttaccaccgccctgagcgctactcggacccggctgtgagggagcaggcacatcttcttccttgatttcaggcggatgctccaccttgagctgttgagcttgactccgaagctcggggcgtagggtctccgctcggcgttcatgaacgaacgaggctgcgttatcagcccaagaaaagttgacgagcacacggccagccagccctagatctttaatcagatgcttcttgtctgatggaggtatggcgtttgtatgcttggatcgggataccccgtggacagtgagaatgaagttctcactggcgaacgatggagcaagacaccctcgtgcgaattcatacaacgactgccctgtgtccgaggtcccaaatttggcgaccacttgactctgatctgggaaacggagcttcacatcgacctcgtgaattgctgctcgtcttgccgcttctgcctctgccttggcagcgatctcggcgtccgttggcaagcgttttgggcgagaggactcgttgagtaaccgctggtgcagttttgcgtgctcgatagagggtatgtaatcactctcattgtggtctaattttgccgaggaaggagtgtcttctgagggaggagagaagacagtaattgctcgaccagaatcggccgtggaagtggccggttcggaggtagatgggggaggggcgacttcgtctgatgcgacggtgacactggagggctcgggttgcgatgaactggagagctcttgaacaggctcattgcttgtactgtcagcgggagctgctgtgggcgctgcgttcttatcctgtgccggaggagcctcatcctctgatgacttgaagaactcgccaatcttcaccatggcttcttcgataggctcttcggtccgtcggaaactgagccgtataagaacattcccactattgaaacctagctgggctagggttttttgtagatctgtgaagctcgatacttcacgttccaaaatctgaaggacggggatctcatagtacagtcgtccggcgacatctccactatcggcagagggcgctgcccgtgaagtgaggttccgtactgggccactccctgcaactcccgcctcgaacttgcgtagtaccatccagagtgtagtcgtactgggaaatttatcaagtatgcggccattcggggcaccacgagcctcagattcgggcagttgcagggcgacggttacgactgacggggagcgggagatttgaacaagttcaatttttgccccagagatgagaccagacagacggtaggaaagagaaaggtctaattgcttgcgattgtgtctgttgcgtagagaagaccgggttagtgttgtcatcggagacaaggaacaccaactcactttaatgagtattgactagcattatatccaagcttcgagcatgcttcctgtaggatatcggtcaagtgtttggtgggagtagtcttgattgttgcccgcctggctgtcgcatcgattaccacaacgtgggcactcattgtgtatagaggaacactagctctggcaataaatagggaaggttgaatatctcaatcaagagattttaaacggacagatcaagataaacaagtgtgaaactcgaatgcggggagaaagacagcgcagaaagtagtcggaaggtcgcatacgaacaggcagcggtgcgggcgtcatctgagctctcgcgtacctcagagcttccccgtcatcaactcacctccatcacctcccccaacccgcccccttctcaaccactttttctcttcttttttcttgtgctttagctctggaatatcccttttatattgaattgcattgaaatcctgcaataatggtaagaaaaatgctccctttgtgcacatcgtccacgaatctctggacctcaaagctgaccgacttctcccatcacagtctaaccccttcgacatcagtatgccggaaccttgtccctcgtgaatagtcaactgaaatactaattgttttgcagatggcggtgcctgtgtcgccatggtgggcaaggactgcgtcgccatcgcctgtgaccttcgtctgggcatgcagtccctgaccatctccaacaacttccccaagatcttcaactacgccccatccacctatctcggcctgactggcctcgcaactgatgtcaacaccgtctccgatctcttccgttacaaggtcaacatgtaccggctgcgcgaggagcgcgacatcgcaccgcagaccctcgccaacctagtgagctcatcgctgtatgagaagcgcttcggtccttacttcgtcagccctgtgctggctggtatcaacccaacaacagggaagccgttcatctgtggctttgacagcattggctgtatcgatttcgccaaggacttcattgtcagcggaacggcaagtgaccagcttttcggtacttgcgagggtctgtgggagcctgatctggtatgtattattggtgtcatcgtacaacttgttgaattcgccttctaacacagtttgtcattacaggcccccgaagacctcttcgagacaatctcacaagccttgcttagcgccgtggaccgagatgctctctccggttggggtgcccaggtttacattatagagaaggacaaggttacccaacgcttattgaagggacgacaggattagatttggggaagtggttgttttgggctttccgttggtttgagggcaaatcccggcgtctacggtcttcactggatgatatgtgccgtgtacggtcatcaatgacgggatagtacaagatcaacgtgagagcggttgatacctgagctgaaggacagttttgttcttttggctccatgtttttcttactcctatcacgataataaaaggccccgttgtcatgtcacggcagtgttccaatttgcatcagaattcaacatatttaccagggaaacggaccaagtccagtcttcgagaatcagtaatcatcccgtctgttcaaaagctttgactgacctttgtctctcttcatagctgcccacctccagtagagaatcccttcgaggatataaagcgaacgagtgagaatatgaccagcacgagctgttggctacaggaaccttttgataccagacaccaacttaggcacttcctaggtcacaaaatggccactattattactccgtttcccaaactgtaggggatatagttggttgttctaattatgtccatagtcgcactccggtgttcctcggtctagaatgctgatattgtacaattttcaaggacgagagctgtatgagcttagttaatttgacgcgatgcgcacattcaaactagaaatatattcccaagagcaggctaactggacggtcaattctagcattcactacatccacgggtacatgagtgcctgacaacatgatattgcctaaataggaaccggccatgggaaataacggaaagtgcttcacattgctcatatgctatgcttggatttctcaatcattttctcaggtcccccacttcatgtcttttatgccgaacatgccttcagaaacagagcacctagagccctctatgccgagcctgcctccagaaatagagcccacaaaggcttctatatcagacctgcctctagagctcatggacgagataattcaactgctccccataaagtgtcaggtctgctttgcactcagctgcaagtctttatatgtacgctatcaaaatgttttggcacaagaggaatttgccttccctacatataactccgacgggggttggcttccatgtggggttttagctaagaattccagccgggaaacaaatttacgccgtcaacttctttgtcgacttcaaggacctagaagactttactgttgctcatgcaccaagttacacctggccaacgagtttgagtcctccgagagggaatacagcactgggataaaccgcaaatgcaagtatcccgggtttgtaaacgtctgtccctgcagtccgttggatattagagcaatggctcgaatgctggaagggtgtcaacatgaatgcatcgaatggcaccgttgctcggtcacaatcgcgcctgaagtggttgccgacgtgaggatctacatttcacaagatgagcagacatatttgcgagtccggagccaatgggagatcgcttacactaaggaatggttcgattacccaaatattgcccgttttttgggctgccctcatcgctctatcgtcccaaatccccagtctctcgtctgtggtatggccaattggacgaatgctttgcgtgcagcctttataggaagggccactggaatgagattggcaaaaaattcggaattgagataacacgaacactcgatgctcgtgagatcttaagaagtgaagtagatgctaagcattcgatgcattgctcttgagatacagtcaattaaagatatatttagaacagtcgaatccatcctttttccgcttctttccgctgtctatatacaacctaagtacctggaaaattccagaagatatttaaaaaacatctaacacgacatccaaaatacctataaaaacgctactattagttgaatggatcatatcgctctcaattaaggccacacacgcggccgacccttgtaaacatacatatagtacggctagtagatctgttctataagatcttagatgtaccgagtaccttccctatcatagataacagccggggaaatcaggtacttggtacccgatggccctctcctgatctagatcccgctgatcctgcagtgcagcctccgtgcgcctccgtgcatctccgcaggattcaagggaaaaaagacacaacacacaaagaggagatcgattgtcaaagggaaattaaagcttcagagaagcctgaaacatctctgctagaaatatcattagctaccagaatctataaagctttaatgacttcttgtttcaggccgtgtctagaccgcccctccccatcgaactaacggaaaatcccctctcccctccttctgagcgtcttctctctttaatatttcatattttagtgaatgtacgttgaagttgtctgatccatccacggtgtctattgttcatacaattgaatgctatggtccttaccaccaccctcggataaacacgagagcccgaacaacgaatcctcgaaccgacgtcactttcactgccacatggactatgcccgacatgcccgagccggatgtctctcacgctgtccaaccgtgtcccacgccattcccctcgtgcaagtcggagtgcatcaccggcgacggactaaatgccgttcatgacgatggagatgtgcaacgcgacttgggaacatggaatgatggtgtccagaccactgccattgaacaattggttgcactcaaaaagtgtctgcgggcagccgacaccgagctgttctggaaacggcttatggaggacatgacgtctataaccaaagcccagtatgggttcgttgctcggagggtgcacggaactgagcccatgccagaattaggcgggcggcgcccgtcggtttttggtgcagctttctactacaatgatggttatcagaaagttgggttgcagcgaaacaattatttcgcgggagggaaccccctattgcacatggaccacgaacggcgttgtttggtccccgagaacctcagctcgctcttatcgttcggtgatgatcaattgccgttcgccgccgatggttatttggcgattcccctcttttcggctggaaagtgcctggcgcacctcgggttgatgtggtcgaaagaaggtctccggcatagaaatctgtcctggtccttcctggagatgattctccactcgctcgaagacctgattatacaacggctggacacaggggaacaaattctagatgaactgttagattccccaacgaaaaatacctccgagttccacaacccccagactgccaccttccatgaagccgctgatttcaactcccatgatttcaactcccaccccctcaaaccctacgcccgaagcttatcccatgagctgaggaccccaatgcagggtgtggtaggcatgcttgatgtcatgcatgctacagtacgcgaggcgatggaggtccaacctcctatcaaatcgggagacatttttcaatcgctcaaggagggaattgaaatggttcaagatagtgcgagacgtgcggttgaagcggctgacaatgtcgttcatgcttacgagctcaacatgcaaattcccaaaaccccactccgggaggagcccgacatactaggcggtctcacagtcccacctgctatacccgagactcggccgagcatcttcatcgaagggaataacatcgctgtaaacccgtacaaacggcggcggagcctaccatcggagctgaacacccgaccagtgcgcaagcaaagactgcgtgcagtttcgtcccggcaagagctttcgccccgcagcgaagaagtcaagaatgctgttcacgaaagcgaccagatcgtacatgctaccccagctcgccagttcgaagctgtattggctaacatggccgatccacgcccgtctctcgcagtccgacgatccgcccctcacctactccttgagggaatcaatgtgaacttaagacgttctgctttgcgatttaccaaattacgagatcttctccgcttggtaatcaacgagtctcttcacgttggtggccgaccggactctgctgttagcaatgcaaccgagtttggcgaacggattgagattcggtcgcggtcctcaaacggtgaattgttcaccaaggttgtggactggtctgtagacccttcattaccggacacccttcttgccgatgaccgtgatttggccaaactaatctcgtgcgtctttctcaacgcgattaaatttaccaacaacggcaccattactgtttgcgcgactattgaccccaagaagaatgatgttcatattcttgtccgcgataccggcccgggaatccccgctgcattcctacccaatctcttcaagccattcgctcggggagatgcatcgaccacaagaagcaaagatggcctgggtctcggtctcctcgtggccaagggcctttcacgcaaaatgggcggtgacttgacctgtgtgcgttcgtcgacttccggtcctatgcgtggtacagaatttcgaattcgaatccccgtcaaccaacgtgaagctgagctccgccctgaaactcccggtgagagtgtttcgacgccatccacctctaccaccgacaaaacacgacagggcagtgccagtagttctctgtctgatacctctccctttaactccccatttatcctactccagaatcgtcagcaacagccgacaccaggcaccatcgacgaaaacatgtctcaaagcccaacactcctgcgaccgtcatcacaaacccttttgaatcgaacacatatttccggcgatgcatatgacaagaagcttggcgagaaatatccgctgcgctttctcgttgctgaagataatcgaattaaccggcgcgtactggtgagcatgctacgcaaacttggctactgcgatgtacttgaagcggccgatggcaaagaagcagtccagatcgtccaaggcattctctccgcgccaaagccccctgtcctagacattgatctcgatccagtaaacgcaatgcaaggcgtcatcaatgagcctcatcagactacaaaaaccagaccgatcgatgtgattttgatggatctttggatgcctgaaatggacggatatgaagccaccttacgaatcctgcagatggtcgagaaccatcgggaccaacatgctgcttttgagcgaccggaccccaagaaccctgattccatggaaatggatccaattcccaactccttatgtacaccaccccctcccacagttcttgctgtgagtgccgatgttagtgacgaggcattgaatcgcgcctccagagtgggaatgaaaggctatatgacgaaaccatataaactctctgacctccaacggctgattctcgaattctgcggcggtactggcaacggcgttgtctaaatcctagtataaccactaggccgcccatccgaacatgatgttgcttccttgcatttccatgcccagacattatacccattgatgcggatatttttcttttcatgtacagaccccacccccaattgctttgttctttagcccaggcgcctctcacgttagggtatgcattgactcggcgacctattcattttcaactgccatataccatccttgtcattttttggccccttttcagctaggggaaataccatgatctagttaatagacgtgtgcgaactagccagccctggagtcgactggtttttgttagggacataagcatgtgatcacatcacgcttgatcataacttctcttcttttcctcttcttctccccattgctagtttcctcgttgaatgaaatctttcttttgaccagaacgtctgcaacaatttgatccaaagccttcaacatttacttaccaaggcttattcagcacgctttttattaagcatctatggatgctcacaaggtatataaaacaagctaacatagtcgtcttatccagaacaatataagtaaccgcattgtttgcatctcggttcgccctggcaacgaccaggaacccttaggtccatactgcaccaatctgctatccggagagaagacctgtgtcagttctccgggcgatcttcagaacttaaccaccattgtggccgctatccatacgggcatcaaaccagaaccatggcttatgattcctcaccctcgtcatgatgcaccccaccgattactcgaacaccagatatcattctcatgacgaaacttcaccgccagtgcatgcaaatccaccatctgcaacgtgacaatcggataaaactcttgcaagatagactccactgcacattaatatactccttaaatccagccccggccacatccttatcacctagacctagcatctatggaagacgcgggcggcttgctccctgggacaccgaaacaacaaagggaatcttttggcgctcgcgacgcggcgcggaagaaggcagtggagggacaatacagactccatggaagccagtgtcacctcaccataagacaagcggaagtgtgttttgtttcctctgaatttgcggcctccactcgggcctagtggcggcgactcatttcctgcatgatttcgtggaaactatcttcgccgtgagtggctttgagaccatcgaagagattggtacgttgggtatctgagaaggtcatgaagtcgtcctcgctggcgttgaggagctggtcttgggtctagcctgggggtagaaggacacaattcgctcttagtgaggtggaatgaggtatattcattctgacaacagcggtcggatgtgggatttttagcgtttatgaatatattcactactacgtttagaaagacgtgtgctccaaggcaataattttcatttctctagatcaagtcgatatcaaccctaatgctttcttcttgcattttctggggagccagcatatgtcatgagttgaaaagacttctggaatataggcctatacatccgtcttttatatgaacctattgtcatattgacataggcagctctactcgcaaagtgtgaaatcgtccaatcctgaatcaggaacagccacgtgagggaggcagaggtcgacattctctcctttaaggtgcttgaagacccgagagtactcggtctatgaagaaattagcaacttccctttccacatggtcctttagggcatccgggagcacaaacctcaatgatgtccacaaactcatcatatacgtgatccgccttcatcttctgacgaacgagatcggtcactccgcccaaaattgcgactaccgtagtgaccttgctgtcccaagtgagaagtgcggaaacccccgttccatcaacacgagtggattcagtgctgccatagatatctggagagttatttcgattagcatcataccaatcaaaccgtcttgatatctaaaaggtgtcactgactctgcattttcttggcaataaccatgttcctccaccaggcgagtccgacagacttgtcaaccaaaattgtcgggaatacactgtacggcgtaatgacgtctagctcctggacagtctggtttgatatggaggggataccagcgttcgagatatagccggttacgtcgccgattgagggatcggtgatgttgttaactgaggcgaacatgccgggcaacttcgtggcgactgagttgcaggtccggactcgctcagcgttcttaaataggcgactaaatgggaaatcgttagtacatgaaagcctatctctgtcttatgcttgaagtctcaccggacaatatcgatgtcatagtagggcatctccatcactttccaggtttcgtggctggagaaccagaatcctgtcttagaattagccactgtcttctcgtctttcctttcatatccacaaacctttttggacagtgataggcccgaaaccgcccattttgtagtccacgctcaccagctggggccttttgatttcccatagcgcctgcttatcggcctttgacagaccaccgaagaattgtagccagaatgtgaaaatctcgccttcgaaagggtcgtccagtaaatctttagtctcgcatagatacgactgatccgggtgattgacagggagggattggtctttaatgtcaatgacggtacagacccggcccttgcctttgtaaaagatctgattaacagacaggagattagcgactaatccaaatctaacggggaatcatgagttacataccttagcagcagtagttttagtgtagtccatccaaacctgccatttctgtgcgagttcccgatagcttttattgcctgtattctcaagagcctggatgaaaccatatacagcccatataagttcactatacagatacttattgttagcctagaaaccagaacgagggaaaagaatatacatacccattatctagagaaggcacgcggttgacccaggctgtcactggagttagatcttgagcatccgctgtgacccagggcaagaagcctccgaatcctgggtaagtctcattgaatttgagatacgtctgcaactttttctgcataatagaagccgcgattttaggagcctctgctgtattctcaggcgagaggaaccgagcagcctccggagagccagcaacagcttgggcgtacagcatgatttgaagggactattggaatatgagttgagggctttcaaacagtaggaacatgagcacaaacctctttgctggcagcactgaacgtgtgcttggttgttgcctcgccggtcacccaatcgatgttagtgccatcgtaggagataccattgttgctattatatgagatgttgttctgatgaaacttgccctcccaatacagcatatcattgatgaaggcagtaggatctcgaaggacttgcttttgggaatattgatgcgcaaaacgacatgacggctccttggtatgtccggatatcgatggtagagcattgaccaatgttgtccatgttagaacatggccgaatttctcgtggagacgcatgtcaggagctcaaagtaaagagttgaataccgaattagaatgactagccatcgaaacggacatctcgactcatataaatactgtatgcttctgacttgaggcggaaatcgagtatttgccgaatttccatgtccacgaattatatcacatcacgagtctctggggtccccgcattccaagaagcttttcccctgagaaagccttgaatctgataatgggctgagggtgcacgccaccatggtagacgttttcccgtttgtttagctcgtgactatgcgaatctatttccgctataggatgagatcttcaaccgggattcttattggaggtcaattggccgaaggagacggagaatcggggaattatagattgtgtggggaatcgcagaatcttccccagacgccgatcatttactcgattcagacaataggtaggtacggagtaagcgaagtatgtttttatattttgtaattgtaccattaaatctagttagttaatatacattcatttgactcataaaactagctttcataacaaccgtcgtaaagtgtccgacgctttcgagtctaagcgggtcagtatatcaagaagcaccgatagatcgttacgggctcgagccgacagaggggacgcttcatgctgatcgataatctcgagcagacaagctcctatgagcctgatcttttctacctatatggccatcagaacttgctcatttgacaccaggacagcaaaagaaaggcgacttacacatggttcgccattgatctgcaatgcccagaaaggagcatcgcgaatgactcggagaagatcgcgtgcaatgtcagtcttccgtagtagtagcatttcatttggcgcagaaggatagtaattgaactcttcaaatttctgtgtgattaccatctttagacagtgcaacgagacgtaaacgttggctgcttgaatgatatgtagccttgtgagcctagacaggcgttgattgtctttattggcgtttgacatgagctggtcatattgtaaaaaggggggtaagtcatcgagagacgtcacaaacagcacgtaaagatggtcaagtctgtgactttcttctgccgtgggaggttgacgagggagtaaattcccatttttatgactatccaacaatcgcatctctaaaagcaaatcggatgcactttgccaaagccgaatgtttgcattgaatcctgcaatgaaactattttgagtactctcggcatctggaacaccactaccaggtgtcaggattgtttcatcttcaatgccggtcggatagccgatggtgatgccagagttgaatgagtatttgtgtattgtgatcggacgattgttcagaatggctgccgatttatcgccgatataggcaatccagaacgcccgtcgccgaaactccacttcgagagaagtgagcccctgcagtgaatcttcttcgtgcatctgcatcacttgggctaatcgggtggcttccccaaagatgtgccacgacagtcgtggctttccggcagcatgcatgcagttggagtggaagtatcgaatggcaacggagttggcatttgggtattcaagatcggcttccaaatatgtggccaggcaatttctggaggcttggagaaatatgtctgcgatcctttctccctcaggaaatatatccttcggaaggagaaaagccgtttccgcgcagacagcagtgatcaaagtgaaagaaagatcgggccacagctctggatatttgagactattcactccatatatgaggccatcagctctcgaattccttccttgggtcacgaagaaccctaacccatctcgtagactgggttcatgaacaagtggagtcaagggatatagatattcaaagaataactcgaagcaatgattgatagtccgctctaagttcgctgatgtgctctgcacgacaatcacccgttccaaagcatgccatcgctgcaacgccgaggtaattcttgtagaggcgacatcggaaatagacgattgggctgtatgcacagtatcaggggaaagagccggatcaagtatcgggatattggcgtcccatacatctagcggaactgcaaccggggcggtcgaaccgagattttgagttatagagtcatcttccgatacctgcaacgctggtgccaggggactatgcggaacatttggataagccacatcatgcgacctttgtcgcttggatttaggcccacgtctggcgatcggcacgtcaaatgtgcattgcatccgagccaagcggcagttggtgcatattgacgattcacccgagcagtcacactattacaggttagtttagactaggtaaggcgggggtttgcttcatacctttgcttttctccgacggcaacgatcgcatgctctagctgacgagcgcgaacgagatacagggctggccatcatatttttcgtctcggcaaaattcgtcggaggttagggcagttgggaaaatgggaatcgggatgagcctcggtcaaatactccgcgaatttctccgaatgccccaggtttttcttttcttggggtatttccgcgccttgattaattaattaattaattaatatacattgattaacaggggttgaaggtgctttatattagctttgtagaattttaggtcaattgcgtaatatctaacaaaaaaaaaaatctcatctatagtatacccgtctcattgctctatttggattcggaagcgttgccacccatgcgtttatcaaacattcctttcagcaacaatgcggattgcttcggcgtcctttccagggtgttgtaatcagtgaaggtaacgccgaagcgaaccccgtatccatcggaccattctggaagaaaaattagctcaaaggtcttgaagtatgaaacaagacacgtacctaggttgtccatcaatgaccatgcgaaatatcctttgatatcagagccatcttctgtgcgtgctgttccgaccgcatcgagatgatcttcgaagtatttgattcggtaggtatcgttgacggcctcttcagctgtcatcttgtcttcaccaggacacgggcacccgttttctgtgatatagataggcttgccatatgcacgatatactcgtgtcaagtgcttccggaaaaggctcggggttgacaggagccaatgcacaccacttttctctccgatcaatacaccttgcttgttttcttgtagttcatccacatttcccaagaaatcagtctcagaggcaggctgatcgcgatgccgggcaaattgggaggtgtaataattcattccgtagaagtctatgtcggcctccctaagcagagaaaagtccgactctgtgaacctaggaagtctctcgccgagttgctctctcatgcattcggggtagtcttgtgctaaactgtcaaaggtgttagttgtgtgcttttgctatctgaaactccgaaaaacctaccaaacggggttcgcaaaccatccgatatggaactgcatccggcgttcagcagcttggtggtcgcgctcatcctcactatcccagggctcgtagtaatcgccattcaaggagattccaatctgcccttgctgagaagctcggaattcccggttatacaaaaccacagcgcgagcgtggctcatgatcaaggctttccccacaatccatggctccgtagtagtatcgccctccgtgcactgcggatttatactgctacgcccgggcgcatttccgccagtagcgtatccctagacacgtgttagatgctatccgaaaggataaaaaagaaaggacaagggactggagaaacatacgaaaatagaagcaatccacggctcattcagtgtgatccagttcttgactcggtccccaaatctctcatagcaaatctgcgcataccgctcaaagtcaagctgtgactcctccacattcaaccaacctccgtatcgatcatgaatgccttgaggaagatcccaatgatagagagtgacccatggtgtgattcccctggcaagcaacgaatcaatgagtttgttatagaacgcgatgcctgcttcgttgactgggtcgtttcttcctcctagcggaatgattcgcgaccaggaaattgagaatcggtatgcttttgcgccgtatctcgagagaagatcgaaatcctcctcaaatcggtggtagtggtcgcaagcgatgtcgccattgtctcccttggtccttgttggctcaaggtggcagaaagtatcccagatcgattttccacgcccgtcttcattcacagctccttcgatctgatacgaggctgttgcaaatccccattcgaaatcggggggcaagggtactgacatactggcaaatggcgaacacaaagccacagaagcagtgtgaagtactttgaaaaagaagaaggtgacagagctctacccaagcagaaaattaaagctatattccttatagccggggaattgtggcgttgaagtggagagctcccattgaaggataaacggcaaaattggcatttcgccgattccccgaatctccagacttcacatttttctccacggggtaattccccgcagaaatgcggaatccacgtttctttcagcacgtgaacacctccagggttgtcggaatgcgtagagttcgttgtatccacccggctgtctcttctataagaagtgcaaagaagccttcgggctaagactccctatcattcgatcataggcaagtccacttcatttgtgtcttagtctcaattgaagtctgcaatcatggctcctactgccgctcatgccacagagaacattatctcgtccattgacgtggattctatgccgcctttctggcgacggaagaatggtattctgctatacttcctgctcacttcgtctctactagcaagtgcggctctcggcattgatggggtgagttgtagtgtttcaagactggagtgcgtttcactgacgatctatcacagtccatgacaaacggcatgcaagtcttggattcctggcaagatcgatttggacacccagaaggtgctacattgggtttctttggagcctcgaacgccattggtggtgtcatcccatttatctttctcagctggattagtgataaattcggtcgtcgcctacccactgcgctagggtctgttgtcatcattgttggtgtgcttgtcgaattctttgccacttctttgaacatgtacattggcggcaagatcgttctaggtgtgggatcttcgctcatccagatgggcgcacctgttttgatcacagagctgtcccaccccaaggaacgtgtacaagtcactactttctacaatacatccatcgttcttggctatgtgattggagcctgggcaacgtatggttgttacaggatcaccagtcagtggtcatggcggctccctactttgatccaagttgctccctcggcctaccaattctgcctcatttggttctgccccgagtctccccgttggttgattgcaaagggtcgtttcgaagaagcccgtaagatcttaatcaagttccatggtgaatgtgaccccaactcggagctggtcgcggtggaatgcgccgaaattcagcaggccatcgacaaagaagcagagaacaacatgagctggaaggacttcttctcctctcgcgccaacctcaagcgcctgttcctctgcttcgccacagccgttttcagtcagagctcaggcaacctgctcgtctcgaattacttgacccagatcttgaaagacacgggcctgaagacccagtccgaaattacacttgtgaacggaatggttactctctggcagtatttcgtcgcgatcttcgttgcactggtcatcgataaattccgccgtcgattcttctttcttaccggttccggtggtgttgttgtcactttcgtcgtgtggacaatcgctgcccagcaatatcttgagcacaactctatagtggccggtcgtgtcgtgattgcctgtatcttcttcttccaggcattctacactttcgcgtggaccaatctgattgtcacttattcgctggaagttgtgacacttcagatgcgcgctaaaacatgggcatttgtgctcctgactattcaggtggcctcgatcttcggaagctatgtcaaccctatcggcctcaagaaccttggctggaagttttacatctactactgtgtctgggtgcttgttgtcttcctcgtggtctacttcttcttcgttgagacggccggtcctacgctcgaagaactcgcttatctgtttgagggcgaggatgtcaaacgtggagttgttgacaaggtcgcggtgcaaaaggaacaagtacaatatgaagagcacgtggagaccaagtcggcgtgagataccattgatatgaatgaaccatgacatgacgatcatgcacataacaaatgaagataaaaataattacaaatcaatgatttccatcagaaattcgaagactatgttgaataaacatcaaaagagtagtcgaccgtgtatgaggcctctattcttgatgacgtgagctgtaggaataatactattagaggtacagagtagccctagagacatgcaatatgtccacaggttgaggtcgttggtatgggcaatgtcgtttcctggaagatctacgcaagacaagggaatagaagaaaagatatcattacatccattatcaagatcgacatcttaccacgctccaagcactccgcaccctttttttgctgaaacactggctttgtggcccaacgagttcacaaaggggtctcgagaattcgaaaggccttcgactagaatttaaagatctgccgttcgctaggaaaacagtataacaacacatgtaagcaccaatcatcaatattcacgtaaaccgacgtgcgtgaccacagcagaggtggaaggaagatgcaaggcataagaaacgaggtatgctgtagggaataagacaacgcggcatctaagtcaacttctgcttgatgaagaatgaccgcaggtgtgaaagctgccaggcacatgcggcggacaaaacggcgagctggataagagtccagcgcacgacacgcgagttggtggtctcagactggtcacggaattcagactcacgttcctaggtagaaaaaacattagtatcaccactccaatcacctagagagactctggccatagattggattgggaaatccttacccgctggtacacctgctcacgacggatatcgtgcaatcggctgttcatatccttgacccgctgcacgatatccttgattttgtccttatcctcaggctcaatcttgctggtctcaccaatggcaaggtcgacggtgatcttgacggcgcccaaagagttggacaaccagccggaggaggcgtccgtttcaggtgtgaagcagattctgtgctggccgggatccgcggcggagaagtggaagcgaccagaatggctatcccgcttggatacgacgcggtggtcattgtcgaaggtctcctcgacagtgatgtgcatcttcaagttatggtcgacggcgtagatgccgctctgggggttcaggacttcagtttcgaaacggcctatttgtgatttaacaacataggttagtttcaaattccttcgtaaagtctctagagatgcgcataccggctactagagtatccttaggcaggtcctcgaagaagcactttgtttgccggccctccatgtagaagtagagggcattagtcggcagaagaagagaaaagaaggataggagagccaaagctgacgccagccatgacgaggatgtcccagagaaaaccatgatgaggagatgggcaattggatagtcgcacggccaagtactcctctccgtgaaggtgtcaacatgggacgtggctcctcaccgcctgccgtctccggaatatctccctttccagcgggaagcctctgtcgatgtgatcttcaatttcgacattcactagtctttattgcatcaaacaaaatctactttcatcttctcgtggtcgcttattaaaatctaatcgctaaatatcgaagaatcactccttggtgtcgtgtctagatcaccacacccaccgccaatatggccgcggccgatgttcgcgacatgctggatttgcccgcagaagggcagcccagaccgcacaagaagcagaaggttgtcgaaaagcgaccaggtaggtgtattgcgctccccgaaaaataagatagattactgacaggctgttgttgaagagggtattacccgtgaattgtacgcgctactgggcgaaagggcgccgccaatcgccattaatgagaacaagtacaagggtcgtccaaaatggatgaacaagttgcgcgttcgaccatggcatgttgaagatggggctctttgtatatccgaatgcacgctgacattgaatcccatataggagcatggccccgttcacgaacaatgcccgttccgacggcctggttttgaaccactggcagcgaaaacacgagtcagcccgaccacctgttcccacacctgcacccgcaccctcagagtcccaaatggaagtggatcagcccaaagaagaagagaaagaggacgtaccaaaactgccggaacaagaatatgcctttgctaagtataacgtcaaaccgcgattgccccgtcggtacacagatgacgagtacaatcggcatcttacaagtgatgactggtcgcgcgaggaaacggactatctggtggacctcgtcactgattacgacattcgatgggtgctgatcgcagatcgttatgactaccaaccacgaatggacacacagccggatgcgaatgcccttgtgcccgcaaagcaccaccggacaatggagcagatgaaagcgcgttactattacatcgctgcaacaatgctttcacttgaacatccaccctcagagatgtccgaggccgagttcgaactacacgaaaagatgctcaagtttgaccccgaccgagagcgtgaccgcaaagaactagccgcccttcagcttaaccgcacagccgacgaggtccgcgaggaggcaatgctactcgaagaattgaagcgcatcacaagcaacgagcagaacttcatcaccgaacgccgggaactctactctcgcctcgaggttcccatcagcgtcggcaacaccacaatgtaccaatccagcgcgggtctttcccagctcctacagactcttctacaagccgacaagagcaagaaacgccgctccatcctcggcgacggtgccatccaaagccccgctggccagactccaaccactgcgggtggcatgggccgagccgatacccccgtcacacaggccgcaaacaagaagggttccatcacatcaagggaaaccaatcaaatggtacgcacgcttaccccagcagaggaagcgaggtacggcgtccagcaccacgagcgtgtctcggcaggcgtgcaattccgcagcgaccgcgcacagcgactcacgcaggccaagtccaacgtgcaaacccagaaactggccaatgctctatccgagctcgagatcccggtgcgcctgttcatgcccaccgaacgcgtctgcaaggatttcgagaaactcattcagtctgtcaacatgctcctcgacgctcgcaaggtgtccgaaaaggtcgaaagtgagatccgtgtactcgaagcctcgaagatggagcgcgagcgcaaattacgagaagctgctggtatctcggggccaagtgctgactccgggcatccccatgtgaaaaaggagaatgaagatggcgacaccggcgttttgggtcactctactgcccaaggtgctcaacaagggggtggtaatcacaagcggtctgctagtgtgcttagtgccgtaagcgacaagagcaacaagcggcagcggagatagatcatttgcttccctactggtgataaaattacacccttattctgagcgtgtgagaactgtaagatgtattagggatcaattacccatattctgtacgattaatgacacccaatttgggaaacatactcataattgacccaaactccatccgcacgagtaacaataacagcagaactcactcagagtccttgataacagtatttttatgcttatccaaccataacactctcgttactcctgtgatgatcgttgccatgcatcttggtcactctgcctccaccactagacttgttcggctcgcccaccggcttccatagaaagccccgggcatcccaatgcactcctgatacgcactagcgagctcctctgccatatcacttctggtagagtttgctcgtcccaggtcactcgatagatgctcctggtactgcactggcgattcatcggatagttcttttggagggagattcgagcgtctcttgctctccctgttcctggaaaacttcagtacccaacgtccactacgggagcgggaaggttctccatttaatctgtctgcactcctgtcattcgacggatcgaagtacacagagggctggtggtttgtctgatccatcgagaagcggcgttcaccaagtggtgaagcatctggggaccgggtacagacatcacgcccatgggttgaattgttgtacttctctggttgtgattgttggcgtgtggaccggctgattttcgcccatcgacttaaaaaggtttcgtcaacgtcttcgacataaaagctgcttccggaatttggcgtctttgcagaagttggtgtcttttccgaagttggcgactcaatgtgctgcgcgcgaatcgagtttacacggccgacagtcattccttcaccagccaagtccactgccagcggtgcgtgtctattacctcgaaccgaatagctcttcattttggcccacatcgatggtgtcaaaacgggttctgccttgacattagtaggactttggttcacaggagactgttggctgtcaggcctcagcctgggagtgtctctgtgatcctcagcattgtccaccaagctatacccatagcccattcgccggcccccggtcatccagccgggactaactttgcgatgtggtccggcaccgttggcgccattggaaataccatgactctggggcgatccccagtttggcgtatcaagttgctcaacaaacttgcttttcagagcctcggtacctggttccagttcatcttcgaccgagcaaatctcagctgccatttgtgtatgaatattgggcaagctatcaattgcatttgcagcatgaactctcagtgattgaacggcagatgctccccgcgaagggtcactgctttggcgcgaataaaaagaggacgcatctcgttgatgagacatagcctggttgtggggctcgagacccatgattgccgttccagacctctcatgaggctgaaagttctcctgtgataccatttgtagcccataccgattcgcacgtggaagttccgacatggatgcattagtcgatggcggctcggaccccatgcttgttcccgcgagtctgtgcgaaaggtctagatcacgatcacccagatgaggtactcgggcctcggcgtgtgtcctgggagaactagttggttgtcgtgttttgcgaaccataatgcccggatcttccctggctagcgatgcggaagatgccgcgcgataatcattagggtttgatcccatgtaatgagcccagtcagccacaagattttgaaggttctcaccgctgctgctgcccataaagccttctcgagatcggagacgaaccaattcttcttgactggcatgaaggcttggaagagattttgtgaatgtgctttgctcccccgatcgctcatttttgaatgaaggcacggactgactccctgtgtgttcggttgcagaggtggggtgagctgagcgccctctcaaacttcctggtggtgtgggtatataatgcatcccaaagggagttcccggggtatcggattgttcatggcctttggcacccgtccacatctccaaatcatttcgctcacgactgcgctctattaggtcctgcaaccccattctgcgatatgccgggcttctgggcgacgctctcatatggggggcatgccgaggactcccaatgcactgggcatcactgtcgtaccctcgcgcgctcatcagactgcttcccatgtccccgaccattgatagccctgtagtccctataggtccatttggctttggcttgagcgagaagggaaagatgggacggttttccccagactgtctggattctctcgagaatcggtgacggagacgcgaaagacttgtggatctccgcctatgactttgcatagaccttgcagttgatcctagtgcaggggctgtggtctctcaagttagccaaatataatatgagatcaagtaatgggctgagccttgcctggggctcgctccctgggaccatccacattctccatttgaccatcttggtatgattgtgcgaagccaatcggagaatcaacacgatgtccccttcggagacgaggacaagcaaggaaaaacatttggacatgggatgtttacaagatgaacttctacgcgctcataaatctctccttgttagctttttggggaaggcactatcgtcagcagatgagccttccattttaagacatcacggggtcgcacttgctgtttgttgatgtcttgggtccatggctcagtctaactcaatgtggttttggctcacaaccttgcgtataaaacccatgttgacatctagtacttacatgatcttctcttcgttcaccatatggagtggatattgttgttattcattacgtactagtgccagaagtgggaccgtacccataagcttgtttttagttttaatatgggcaacagtaggactgtggaatatgtatgtcctcaatgaagatgaagaatgtataaaatctcttctttctcttattctcactggttagcgggcctatcccgtaaaaacagtttcactttctattccaccgaactgtcgaactcggtgattttgccatggacctcgtaagatcaaaaagcctctgctgaggatggaaataatcaccgaacaatagttgcttataccaacagtggaacgtggggagctgctggcactgaattgtgtactttgtaccaaaagtaagggagtttggccatatagtgcatggcccaatcaatgcaatctgctaaccgcccaataacaccgtagatcatttttgcaatagattaatagggacatgaacctccaatccgcctagttatgtatccatcgactcgctgaatcacatagtggggttgtgtaaatcagggaaaatcccgcgggctcagccgcaagacgacaattcgatttctttggactttcccggtttctttctttgatcggatgtcatatatcccacatgttaccccacctcgtgtcacctttgaggctctttatcatttcgatgtcaaccaacttgaagaactcgcgctccttgcgcttgatagtcgcccttgcaattcccttcacattcatttgttatctctactcgtggagacaatcacccatattggtctccagtctcgccgtaccacagtcttccgagacaactacaacctgcacagcgatatcagtgcctctaaaagaaccctcgaataacgacaataatcttactacccccgctgcacgcaattgtacactgccagacaagatctggcattccgccaagcttgatgatatatcagaaactcaacgcggatggaccggcagctggaccagaaaaaatccctctattcgccaagaattattgaccgatcgatccgccgaagcattcgttcgcgctcattacttcaaaacacgaccggatattgtggaagtttatgaagcccttccaattccgatcctacgtgcggatcttttccgttacttggttgttctcgccgaagacggcatttggggcgatttagacacctcgtgcgagaaagaggttgccgagtgggtacccgtagaataccgaaatgagaatatcgatatgattgtcggattggagttcgactttgaatggcgaggaccggggacgggagttgcttcccagttctgcaattgggtatttgttggacggaagaactcgcgcaacctgaaagttattgttgacactgtcatcaataaattgggaggcattgctcaagagaacgctgtgggaatcgaagggattaccctagaaatgctttcggacgtggtcgacgtgacgggacctaagattatgacgatcgcgatcctggagagtctcggacaattactcggtaggaccgtcgatgatcgcgattatgcacacactaagcggcccaagctggttggtgatgttttgatcatgcctggagtctctttcgctgctcttcaaaacgggaacccgatgaatcaaggtgacgctctcgtgacgcatcattacgagggctcgtggaagaaggaagatgcagatgcaaaggagaggaaaaagcagaagcaaggaaaagaacggtagcaagaagggtcatcgtcaccaccactgcctgctacagcctgattagaattatgataataagcgaagagcagcgggttgctttgattttgctttccttgtgtgttgttataactttttcattccccgggatgtaatttttcgctcgaatcctcaagagagagacaggattggagattcaaaggaacatactatgtaattaccatgtggagtatggtctattttcggtttatgctatttaaaatagtatatcaatcaaatgtcgtgttttcccgttctttaatccccgatcaacggaaattcaaacagggacaagattcggggtttgagctgcctattccaacccaaaaagaaatagaagcgcctgtgcacgaactaagtacataatgaaagcgaataacacgagaaacctatcagagtatcaagagaaacaggtgcaaatttactgccaatggtaagagacaaattgaattaaggtactccgtacaaaagaagcaaaatcccgacgacgtagcacgtgatgaagctctaccctagctggattgataaaaatagcttgccaagtcggatcttgccgatctcgggagcagatcactttgctgactggtggagctgtatgtatacattactccacttgagaatcgccaaagcttgactctgccaagagaatatcgagacaaacgcaagaaacgcaacgcatctacctgggtataaaccagactagccttgaaacgttgtccactgcaagtacccaaaggagacactccgggcgctacgaaagcagattaaggtacccgggtcttattatacggttgtacctaatcgaggttttttaacgcagtatgggaacaaatgaagataatttactgtggagaaataagtacagtgtaagacgcacaactcctccgtcgttctttcgatattgtattcattattgaaatggacaaagtcaacgagaggattgattccacaattttcaaagcagccgtgccgcgatatgagatcttacgctaaggtgaagggatacaggaagtccttagccaaaggctacgcaactaccgacctaccagattttcgcaacgagttgtctgactatctcaactgtgaagatcagtctactatcgaattatgtggctacagcatgtacgagtggcgtagagacagcacgttcgaggtcttagaatatggatgcaatacggtcaggcctcgcaagttcggcgacatctctgccatctttggacctgagatggaaaatgtctggtgtacatgtactttaaaagtactagcaactacgggcttgtctctgtcagcactcagtcagacttcagctattactaaggcaattcagactgcgactcccagcagtatcaacagcggcagttacacccccgcaaactctccacatgtctatcccaccgtcgataacatgtggttggcaaattccagtcccttaccaccttatccgaacaaagaactgtattcttgcatggtggacagtctttcgtgtatagttagtcaatattgcacgcagatcaatacgtagacttatttaggacagtatgagggagcgacaagagcgcctgaggtggcatttggattccaagaatgcaaccacgggacagtacagtacctacgatgcctgcgccagcaaggaccaattctcctatgtattcgaccgctactatcaaggccagaagaaggatcagtcggcgtgctatttcaagggagcggcgtcaatctagtcttgtagggatccttccggaagttgcagggcacttctcagccaagccgatctagctggaccaaatcaggtcgcaggtccagagggacgggtgccagtacgatgcggccagttactatgttactctgtttttgggtgaccatccacctcttctgttcggtcatggccactagccacatctatagattagccaggtaccgccgtcgttagttgacgatcgcactattgatggagttatctattgacagcagatattaccagagccccattcgtgtgcaagtccaataattgaaacattattggatccaaatcactccagatagctaggtgcagaagtagtggttattttctgagagcatagagtgacagccgcgataatcaacattgtcggacaatccggtgacctgattagtaatcaggtgtccccgccccacgtggggcctaagaccgttacaattttttttacaaaaaattacagatcttcctcacgcccacatcccatcgcactcccctctttgaactatttattccgtttcagacgtcaagtcaaataccgcaaaaatgggcaatgtaaggaggaatccccaagccatacagacgacgccagaccatctgagctctttgtttgggcttatcaacgcagtgaactaacaatactcgatagggagccaaggcaagcatgaagcgcgagcgcaatgcgaaggaccagaagaccgctaagtcgcagactaagagcgtacgtcaagttatctccaacccccatattgtctctccggccgctgacccacatcattgtctagaacgagaaagctatgaacatccagtgccaggtctgcagacagactttcctccagaccaccaaggcgcctgcgtatgtgattccaaaccccagtcctttgcgaatgccttccggtcttgcccgtgtatatggttccttgctaacatgcgtattcgcgcggctatagcctcctcgagcacgcctccaacaagcacagcaagggtcttcccgattgcttccccggtatcagcgcataggaaatcaccccggtggaaccgaaccaatcttctttacgatatcacgggttagcatggctttaggagttttgatgggaagcgaacatatctagcaactggagttgagagtggacactctacgtaggcaactatgtaggtgtaggtggtgagatcataatggggtgtacatgcggtggtgatgtgaaaacccttatgattatagatgcagtcgacgatacatgatctttctctccctccatgctcactaattttcctacagtactaacagatggtggtgaaacttacacttacggggattagatatagtcgtaggcctgcttggcgaagaaaggtcgtagggtgatatcgttttggtatactatactacacattctacaatgaatttatattgattgaaattatcaattatcaaaggtctaaactgacaagtatctaccagacccagacccaacacaggattatgattagattgtgatatcaacttagcaacattattgagaactctacgagtatcgtactatcaagccatattcacatgaaacataccaagtgacatggtgcactgatgatggtgtgtgcctctctcagatcactctcagatcagctctaccatggaccttgccatttcgagtttctcagttggaacaatttccatttcgaccagcttgctgatgatacgtacagcccacccttggcagttctccgtgacagattgcctgttggccgctcgaggggggggctcttgctctgtttcaccagttcttcctgttcctctgtcacactggccagatgatagatgttcagaaaggaggcggagtggacaatattaatagggtcatccgaaggtagatatgtcatcaattctgcatctcccgtgacctgatacaccatgccaggttcgttctcagtggcgacaaagagtgaccaatgcagaggttccccttcaccttgttcctcatgaaccagagagattgttttggagggtgggggagagtggaggaggtgtctgagacctcttggaattaattttttgctcgatccattcatccctaagaccaatgatgcgtatgggagagtctgaagttggatagccactcatttctaggtgacataagcatcaggggttttcgtacaatgagctaaacaatttcagtattcactaacgaacgagcgtctcttgtcgcaatggtccagggtagagatatttgaacattgtattatctaactgtaaaaccaccatcaactctaatatccgcaccattgatcatgccgctggaatcctaatgtaaaagtcagaaccagagatatagcccactaaggaggaaaaatacctgacaaagaaacaacacagaatcagcaacctcctccggaagcacaaacttgcccgtcggtatattcgccaagaaggcctctttaacagtcgcctccccccaagccttcctcccaagatccgtccacgccacagtcggagacacagtgttagccgtgataccccgaccaccccactcagaggccatactgcgcgtcagacctaggagcccagctttcgaagcacaatacgcgccatgccgatgcagcgcgacatgtgccgcctgtgatgaaatgctgacaatccttcccggtggcgggggattaggcgatgattcggcggccttggatgcggcaaaatagagtcgagcaaatgcctgagagcagagcatcgggccgtagaggttagtggtgagatgcttcagcgtttcttccggggatgttatctccatgtcgctaagagatacgtatccagccgtgttgataaggatacttgggaacgctctgttagatggagagcgcgaggttgggtcgattatttgtttttctaaggagttgaaggccgcctgcacagagtctggtgaggtgatgtcgcattcataggtgtggatgttatctaggtcgccgctcgcgccgtaccgggattcgagaagctcatcgcggcgtgcagcttcgaaaggtgcgtagagaatggcgagatgggcaccttgttgtctcagcttttgccctatgcttgatccaaggccgcctgtggagaagttaggtttcgttgagtctggctttgtgtctcgtgtccctacccaggccgccaggtatgatggctaatctgcgggcaaatgccattttgtacgattatatttgaatagttgcaaaatgccaacaggaactggcacctgacacggtgtatgaacttcaaaccgggcattctccgctgaggggaagttgaacgctttcggaaatgatcgtccagtcttcacttgatgtcactttgtgttgaaaggctgaaagatacagagtagttagagaagcttttgttatttacgttgataaatacaagttaatgagggataattggactagaagctcatcgtttcggactaacaaaccgtcaggttcaagtcccactaacaaagatcatatttacctctctttcttctcccctgcatgaatatcaacatcatccaagacggcctgattctctttcgccgccgcaagtcgaatcctctttagcttcctcgtatcaacatccacccgccaagtaaaagcccaagtaatgaggttcataatgatcgccatgccaacaaatcccatcgcaatcccaaaggaggtcgtatatcgtggtgcgaacctagaattgaacagctgagaccccacagcccctccaatctggccataactattcgcaaatgcgattgcaaaagcagatcccgttgcgccctcggtggtctggactcgccagggccacatcattgtatacctggtttgtcttagcatgaagtattgatataatatagaatgttaccagtcggactcaccaagcagtcgagaaacctcccgctataatcgtcgcggcatatacaccaccgttgttggggaaggcatatagcacgccataacacgccagaatgacaatcatgaatccaagcgggatggctggctgaggaatacgcccggtatctgcgaagataccgaacacgattgtcaatattactgcgaagaccgcagatgggatgtttagtagctgggtttcacccatggagctttgacatttgttagcaaataccccgagcgcttaaagctggggcaactcacgtaaatccaagattggcaatgacggtgggttggtagaatgtgagtcccgtcgtcccgatagtaaagaaggcccaacagaagaggaaaagccagattcgcttgttcttcaacgtcgtgataagttcgcgcagattaaagttagactccgccgctcgaggggagttgcttggtaggcgggcttgtgtgaaggccttttctttttctgataaccaagatgcagttgaagggactgtggagtggttagttatgtctggcactgaaggttggatgacctacagtcaggtaggaagaaataagtaaatattcccagtaagactgtgaatatcccttcggttaaaataagccttagaagcatcattagcatatgatcaatctgtttgagaagctattgaaataccatttccatcctgatagaccaccagcaacggcaccattaaaagcaaatgcaaggacaccactgatcacagtgctaaagtttccaaggagagtcacaagaactatccttggggcaacctcatcgggtctataccaataacataactgcaagagcattcctggccataggccagcctcgaatagtccgagaaagaatcggacggcatatagaccctgtctgtttgacacagcggcatgacagcagagaacgataccccaagatatctgtaattgtcagtgccaaaccaatcagaggtgtaataattcaacgtaccataatccttgcttgccaaatcgaaggtcgcacacctttcagtaaaaggttggacggggcttctgcgataatgtaagggacctccagggtattagtacaacttcaggaatgacgcttttgattcgagatctctcacataatacatagtcgtgaccagattatactggtctgaagtcattttcaattcagtcaggatgttatgcggtgtgcctttatccataatccgggcgtatgagacctaaaacattctggtcagtgatctcccaccaccgtactccgtagatgatcttacgttggtaaaatccacacttttcaacatatacataacagccaacaatggaatcagatgccaatcaatgcgtcgtaaaagcttcttttcttccgcgctactgagcgtcgcacgcgctcgcatcagggtggcatcataaccgggaatgagctcttcttcaaaagactctggagtgtgttctccattgcggttgacatagtgtacatttcctttcgccggtatcggtatttcgtctgcggagacaaccccagtttggcctttctctgctatctcagaagacatagtgatcaccaatcagtgtcttttgtagttggcgcacggaggcaaggtactgctggagcaattgcaacgatccagaaagggtatccagaccattaaatggactctattagtatcatatttgctctactccgcaatctcgagcaccaaaagttggttatctcctgcgtgaattgcgcaagatgagcaaagaccactcggcatggcgtgcaaggattagttacctagcgtcttatactagttaagctggggaatctttgccgatagcatagatataatccctgccgtgcgctaaggacccctcagattggaaagccgaatgtgagctatagtccattgttggtctagacagttgaaacaatctgtgaagatgatctcccaggagccaacacctagagttgttccctagtatgtagcgcactttcgtcaatcaaccttgacttttgtcttcctgatatcaatgtcatagatttgatttatatagcacctattagaatacaaacaaataatgctttgaaatcgacagagcacgcgataataagtcatgcttggcaaattcatggctttaaactagtaaagtgaatttgccgagcaaagataatgcatctcgctacattcagtaaaaaagtacgaagtaacgaaaagaagcaaatacttcagggctacgagtatacgccattgcggggagagaattcctaatcggcccctctcacagcacttcatcttttcctgagagtcaatcacattcctctccagtccctaatctttatcagacttcaatgggccgagaaacatgaagaattacctgtacttttacgccgcatctctagcaagagtagcgctggcatcggaatcccaacaacccttgattggagaagtgatcgacaagaacctgcaatctccaactgtgaatttagaaagaattatcgacgaatctcctctcttatcattccacagagacattgtgcaaattccgtcaaccagcgaggatgagaaaagcgttgggaatttcctcttggacttcctccgctcccacaacctaaccgtcgagaaacaaattatccctccggggagtgccgccgagcaagaaagattcaatctttacgcctacaccgggagagacaggtttccagagctgctgctgaccagccacatcgatactgtcccacccttcattccttactctctgcatccaccagcctcagacaaaacaggggacctgacattcaatcgatcagacctgattatcgctgggcgcggcacggtggatgccaaagccagcgtcgcagccatactatttgctacactggaaacactagatgccaacccggatgcctcaatcgggttattgttcgacgtcggcgaggagaaaagcggcgttggaatgaaacatttctcaaactccggtctcaacccagcaccgcctaaattccacacagtcatattcggagagccgacagagctcaagcttgtcgcgggccataaaggcactctcgggtttaaggtcgtcgctgaaggaaaagccgcgcattcgggatacccgtggctcggggaaagcgcggtctcctcgattcttcctgttttatcttacctcgataccctgcaagatgtcccgcctgagaaaggtggacttcttcgtagtgagaagtttggtcaatcgaccttgaacattggggttgtgcgcgctggtttggctggtaatgtcgttccggcatatgccgaggcaacgatttctgtccgtcttgccgctggaaatccggatgacacgcgagagattgtgcggaaggcggtcgaatatgtgactggtggtgatggaagcgtctatcttgactttggggatgtcgagaacggcgctccgccccaatatcttgattttgacgtcgatgggtttgatgtgattactgtgaactacgggactgatattccttccttgaagatcgatactcaaggaggtccaaaagtgaagcggtatctctacggaccgggtagtattcatgttgcccatggcgatgacgaggcaataaccgtgggagagcttgaagaagcggtgcaaggatacaaaaagttgatctcggctgcgctggttgcccactagatataggccttttttggcttgagagatagatgaatgcagcatgctacagctatgatactctacgctctcatatctacgagtctacaagcggtttgctggtgggatcgcaagacatcgaacccgaaatcgaggaagcccggtagccacgacggccatcgactggactgtaacactcgagctccctgcaactgaggcccatgcagtggggcccaatccccgctggtgctggcaggacatagaagtgagtgatgaaagcaagttcgtcacaaacaccacttcacatatgcctcgggtgcaacgagaattcagcccagcccaacataggaatggccgggcaccgagcccatcagtagcaaaccgcggatctacacccgagacgggcagtcagcagcatctgcctggagataaaatcttcaaggcacgacaccaaagaggaaaaaaagagggatgaagcatgcatgtcctttcgctggtattgtccagatcaagttttaacggtaatatctcagatcgaggctcgcgcttttggaagaccaaaaacgcaagacctcgaacacccgtcatgcgtgctatagaaaacacacttaccaaaagcatccttatagagatgccagttcaccaccttttttgttctcatcctgtagtcccgatgactatcagcgaaagggaagctgccgtagaactcctaattcaaacgcccgtcgtatcggccgagatattcgtcttctcctcacgtccaatggagtgctctgtctcggtatctgtgtcaacaactttgatatgcccaaaccaattatcattggacttgcgccaccactcggcgatcgcgatgatagtgacaccgcccataatcacaatcgcgtagttgaacaaggtcgaatcctggtcaattgctttgtccgagtaagccggggcgcagagaacagcgaaagcaaatccgttccacatgaatgtgacaacagcagcgataatgctaaaccaacccaaatcccaaaagcctggacggaacgatttacgcgtgataaacgctcggcccattccaaccaatccgtatgctgctagggaacccgcggctgaagtggagaccaagctggagaaggccacttgcgacgggagctgggtgcatagcagaagcgcggcaataactgaaatgaagatcacagagttgtgaggctgctttgacttcgacacacgcgatagcacgtcgctgaatgggaagacaccatcgcgtgccacggcgaatacaagtcgcgatacagcaaccaaagaaatcgaagtattgagaattgctccgatcatcgcgacaatggtcatcacaacgtgcgcatggggaccgagcgccatcgcgtacatgttgatgaacggctgaggtgcggtagtgtcatagaatgtgtcaatcggaggcatgcagaagagaaacaagatgatgatcgggaagccgcacagcgcagacgcaacggttgcccagaagatacccttcgcggcggctttcttagcggacacggtctcttcggcgacatgacccgaagcatcctgtcccacgagacaactggcgaccaagtaccaggacaaaacccagttcaacccaggactggtatccccgccattgtatgtagacgtaaacacgtattcggctgactggaagccgtacgtcttagagacgccaatgggaagccagatgaagttgagcagcatatcgatgataatgatcgtcacacccgttctgaacacccacgagtacatgcgcgggggcaagaaatttagcgaggtagccatggccaggaaaataagcgagatagcccatgccacggcacgcgctcggacgtcggccgtgtcgtatgggaagctcgtcttcgggttgaacacgacaacctcggaaatcaggtaattggcgacaccgaacgaatcactcgcgaggaaggcagtccacgcaaccaatgtccatgcggcaacgaggaaggagatgaagcggccgacttgaccgcctccccaggatcgaaaggcccagtagtaaattgaccccgcggctggatagcttgaacaagcttcagcgagacaggcggccgtgacgatggacagaatactaccggagacccaggagctccacctaaggaagttgttagtgatgtgatcaatgcgaaaaagcgcggggaacagcgcggaaagtagaacatacatggcagccggcccgcctccactgagggcgatatagaaaagcacacgaattcctccaacacaattcaaggctgagaaggagcaggcgaaattgtcgaacgagccccagcctcgagccaagacagagcgatagccaagctttaggaggtcgcgatcatcttcattggtcacggaaactccatcggagttctgggcctgatgttcgctgttctggacatcttgcggggagttaggtgcattgagggcaacaacgtcagggaaggtcatgatggctgctcttgtttttttgtcttttgagaggcttggcacttgacaatcgctttcttttttttcccaaagaaaaaagttctaattcaattaactttttccgatccctatatcacgtgggccgatcaatggaccccgacaccggggtttgttcaagggtcttctgagccattattgatttgaagatggaatattaaagcatcatgaggaattgactagaaatgctacttcataggtagtgaagctgccaattgatagtatgttgttaactatcagcttggctgttgtccgggtgaaggggcggggtcaattattgacagcgtgtcacgcatagtggttgtaccgtactccctataagtatactttggttgaccgctcattaatccatacaataaatagcatacatacaagacccttgctgaaaaagaaaggaaagcacttcattggcaattattaatagtcgtaaacaacttgcagccctagagaggtcttatcgtttcaatggcgtgatcatccataggcggaccgatcacggagatcatcaggtattgataccatgcgaggactgaaaataacagtaaattacacaatatcccacacgatccggtcagaaaccctggatcccaggtacacagaagtactgtaccatgtatcataccgtattgatgcccctccaactttcaggtggatcaatcccccattgggattagcgtttatttcctccccctccatatttctttcaccatttctcaaacatttttccttctcttccctcactctctctctcaaaggcatcggatttgtgaaaattctatccttgagacctttttcttcttttccccctttttttttatacacatccgtcagaatggttcaatcgtatgttggctcgactccttgtgaacagtggccgacacagttgctgactatctgaatagatctgttctgggtttcccccgcatgggaagactccgtgacctcaagaaggccaccgaggcttactggtctgacaagatctcccgcgatgagctcctcgctgagggcaagcgtcttcgtctggagcactggaagatccagaaggatgccggtgtcgatattattcccagcaacgacttcgccttctacgatcaggtcctcgaccaccaccagctcttcggaaccatccccgagcgttacaccaagtacaacctcaaccctctcgatgagtacttcgccatgggccgtggtctccagaaggagggcattgatgtccccagtctagtatgtgcaaatcattgcatctggtgtctgaattcaatgctgacttaatcaacaggaaatggtcaagtggttcgactctaactaccactacgtgaagcccactctccaggacaaccaggaattcaagctcgctgccgagcctaagcccattgctgagttccttgaggccaaggccgccggcatcatcacccgccccgtcctcctcggtcccgtctccttcttgactctgggcaaggccgaccgtggccagagcgttgaccccatcactctgattgacaagctcgttcctctctacattgatcttctgacccagctcaaggctgctggcgtcgaggatgtccagattgatgagcccgtcctggtcttcgaccttgccgagaagtccaaggctgccttcaagccagtctacgagaagctcggtgccctcggtgcccaggctccccgtatcaccctcgccacctacttcggtgacatcgtccacaacattgacgtcctcgccaacctccagagcctccactccattcacattgacttggtccgcaaccccgagcagctcgacgccgtcgtcgccgctctcggtcctaagcagatcctctccgccggtgttgtcgatggccgtaacatctggaagaccaacttcaaggccgccattgagaaggtcgagaacgctattcagaagctcggcaaggaccgtgtcattgttgccacctccagctccctccttcacgttccccacactctcgccagcgagaagaaccttgatgccgagatccgcgactggttctccttcgctgttgagaaggccaccgaggttgtcgtcatcgccaaggctgtcagcgacggccctgccgctgtccgtgagcagctcgaggccaacgccaagtctgttcaggctcgcgcttcttctgcccgcaccaacgaccccgctgtcaaggcccgccaggccgctgtcacccctgagatgcacaaccgcaagtctgccttccccgagcgttacgccgagcagactaagaccctcaagctccctcttttccccaccaccaccattggttccttccctcagaccaaggagatccgcatccagcgtaacaagttcaccaagggtgagatcactcctgaggagtacgagaagttcatcgagaaggagatccagctggtcgtcaaggtccaggaggagctcgatctcgatgtcttcgtccacggtgagcccgagcgtaacgacatggtgcagtacttcggtgagcgcctcactggttacgttttcaccacccacgcctgggttcagtcttacggctcccgctgcgtgcgtcctcctatcatcgtcggtgatatctcccgcccggctcctatgaccgtcaaggagtcgaagtacgccgcttccatctcccccaagcccatgaagggtatgctcactggtcccatcacttgtttgcgttggtctttcccccgtgacgatgtccaccagtccgtccaggctcagcagctcgctctcgctctccgcgacgaggttgttgaccttgaggccgctggcatcgctgtgatccaggtcgacgagcccgctctccgtgagggtcttcctctccgctctggtgacgcccgtgttgcctacctcaagtgggctgttgactccttcaagctgtccactgctggtgtctccgatggcactcagatccactctcacttctgctactccgagttccaggacttcttccacgccatcgccgctctcgatgccgatgtcctgtccattgagaacagcaagtctgatgctaagctcctcaaggtcttcatcgacgaggcctaccctcgtcacattggccccggtgtttacgacatccactctcctcgtatccccaccgagcaggagatcaaggaccgcatcgaggagatgctggtctacctcactcctgaacagctttggctcaaccctgattggtttgtgatcctggcgcgatatctaattttctttttcttcatgctaatatcctttttttacagtggtctcaagactcgtgcctggcccgagactaaggcggctctcactgcggtaagaaatggcaatagtcttgaaaacaatgttcaaatgctgataaacacacagatggtcaacgctgccaagtacttccgccagaaatacgcgaaataaattatttcaatttgccattaatttaatgaggaggcgacaatcaacctgtcgcctcagtactggggagttttctttattgatgagttacgacgatgataccaaaagttcaacatatgggtttcaacgggttttctagaggataccaaaagcgggcctggagtttcaacattactgactattttaaactggcgctagccaacattacagcctactttcgttgtggtgttcggttgatgctagttttaccatttcaacattgtgtggttttccacatacagcaagctctacaaccttgcttgatcaagttcgcctcgtgggatttgatctactgcctctatcatagtatagaatcagttgtcaatattacaattaacaatactctgtgtttcttgtagttctgtgtagcctcagtaggtttagttgatagcacctctgccgtggaaatccggtgcataaagccgttgatttgatttctgcaacccatgttcgccgctcctcgttatacctgggacgtttaacttgactagcattgcacgctaacactatatgataaaatacccataggataattttccattgtccttggtataattttccttcggtcggtagcggttgcacagtcattctaatcttgactacagctgctcgtcaaccatatcagcacggaagaaagagcagataatgtaagatctgtcccatcaactcaagtatactgctttgctattcgcattagattgccagactcggcctcaaccaagaaatccgccagtccaatgcgggagttagtacggagaatatcctgtatccataaacaaaagacgagcagattgtgaacacagcgctgatggtatatagagaggacgatatgaggtgttcgtggccgtcgctaaatatgacggggggaatgtcaaacctcaaccacgaacccttcaagttatcctttttaactatgcaccaatttggtggaatatacacactggatgaatactctcagcgctgtattcacgatttattgtcttttgttggaggatctagaatggttgccaacccaggtatcctgcttcactatcagtatcagattgcatggcccatgtgcccccggacgttgaatagtacaacaacaacaagtatcagattattagaagaatcggttccaggtcatggataaacccactagtccaatgcgaaatttggtaaagcttctatatcctccaacaaaggacgagaaggtagcaaatccagcgctggtagcatatatcgaggacgacatgacgtgctcgtggggcagccatttcgagaggttgctacgacccgctccaaaaatatatgaagccatgtcttgagctatccagcaccatagcagatcgcacttcgtgactgcaattttcttgattgcccaaatatttagcaatcaagaataaggatggatttcaaaccacagtacaataaagctgccagtctaactaacaaatacgtgtaattccgatcaaggaaccagacgccgttaccaacgccagcgcaattcaccctaaacaacttcaagaatcaatattcccctttgtttacttggaagcggtctccccgggatttgatgactcacctgccctcccattagcaacgagttttgacgtcagaagagccgaagcaacttgagaggctcgcgggtcgcaatttcgaaccgctaaataaccgtgtcccaagatatgtgacgcaaatttctgtcgccttcgtgaaacgggctaagcgtttattcggcgggtgccccgggactctggcgactagtaactgatcgagatctcgaggtagtttgaagcgcgtacactacttgagaatgtcgcatatgaatcaagagagcaggccaagcccttgaatataccgaaataaagggactcccatcctcgtcattcgacaggggagcttaccgcaacacttctatatacataattcaagacgattgctttctagtcctacgaggagacctagggagtaggccacttgtctcctgtggagtcacagccacagctgtaggatatgtaacccttctattccgaccttgcctgggacttccagtccctcggtccttgagcctggtactatagcgaacctggagagaacccttcgtcctccctggaaaatgtttcacgatccgactccacgggagacctcgtttttccttcagttcaatcaaccgttcgtcctcatcgggcaggaaacgagtcgcacgcgctggttgctttttgctgcaaggttaagctgggtttcaataccagaacagtttggcgactctgtggagggaccattgccgttcttcggactgtgaaacccagtgaggttcgactgtagccaaacgaactttgtgaaacagggcacaggagaataatgagtattggaagtcgactctatagaggaagtgccaaagggaagaagacactatctgagaataagacctagtacttggcaaaatgtttgactgatatttgacaaagactaataattcttgcaactcaaaccggggaatagcagtccaccgtttgcctgcagcgaggtggaccgtatcggtgtcttgacacatcttcttcagtgcctttactcttgccacccgcggcttgaactgtctcgcctggtacgcctctgtgtaaagaatagctgctcgcataggaaatatatccagaatgatgagaagttgcagccttgcggcccttaaggcatatacaatagcgtacctggagggagccttccgaccttctaggaaaatacgttgcaattcgcttctatagcaatctccgctcttccttcaattcaatcaaaagctggttgtccttagacaggattccggttagcccagtcgctttcctagagtaggatcctttctggcggggttgcttataattctagctgccaattttatttttataatatgatatagctttacctaatctctgcgagtaggaatgctctgcctactcttcaaaggtaactaaatagatgatccttaacaaaagtatctcccgtgtaagaaaccacgaataggaatcgtttcgatatcgtgcaaacttattagggaagtccgatccgcgactactagggatgctgacaggctctccgcatcacaacgctatagcccgtcttcgtcgtcatgagctacagccctgtctttctcctggctattaaccacatagctttcggaaacaggctgttattatacttcttggctggcatgctttccccgataatataagctaccggttctaattgtaactcgtctaccttaattctagtatctccaggtaataaatgcgttagagttgattacttttcctagcccatagggttaagaatatagccatttactattatattaccgtctactatatctattatcgggttcgaatatagcaaaatgtctccatctattatagcttcatctacattctaccatatgagccagaggactaggtaacctagctgactgagagagcactaacctatattttcatatacttctgttcggcttagaaattcttcctctgccactaggatgtagaggccaccacgtaccattatgatactagccggataaaccctgccctaaagcactgctagaaatatcatccggcaattctcgactcgccgtatatatattcgatacagcaacgtttgcatttcttcccgaggaggcattcaagaaattcaaactcattcgagcagtcaatggtcacttcttccgtaagctcgttgggggctaataacgtctcgacctcactagatgcataggactgactttgaaggtaatatctcctatttcaacggcaagctctgtgacgatctgagaggatcgtacttgcctaacggggcaggagcggtcacgtccttgtacttgccgcaggaacgactatgccctcgcaccttcccaaaagaacgaacgagaattaagcgagacaaacgcaagagtataagaagggaagaacacgcacttagatagtttctctttttcctttcttcctcgtacttagaatttgattggaattgcactcttttcttttgaatcgaattggctcgtaacaagctctacaatttccccgaggaacctctatcggattcaggactcttgcagaatggtatctcagctcgccaataacgataggggtacgtcctcggtcggattttgttgttctttctttgttctttctttgttctcttttttgggtagcgaaggcattggattatttgtacacactaactaaattgatcttattattggtagtctttttagacctcttggccatcgtttattcttatctttcccttctcgctttgatagctaaaaggcgagaaaaagggtcaacagtacagacgcctttcctatgtataaccaaggaacagttacaatttatagataggaatagcattaagtcacggtagaattacccttaaaacaccccgaggaaatagaatttacaatccaatatgaattaaaccagtaattgaactagtagcgctagtcaattgcagaatgtcgagcaaatagccgaatctatccaaaaagtcttggcacgacgctcctgacgtgactgcgagatgctcagcacgtgaatctcgttgaacccttacagccaatctccccgcgatcgctcacttttgattcaacatttctccaatatggtaccccgcccggatctcagggaattgaaacaaaccgttctcagagcacccaaggatcgaaccctgcggtttagagaagatggaacatttcacattggagtctttgaggatttgcatttcgccgagggtatgtgttgataattgatgagaaatggtcttttgttaaccccttgcagacgacgaaaaagacaacaagtccaaaaaagtgatgtcaacgatcctctcgaaggaggacatcgacttcgtagtcataaacggcgacctagtctccggcgaaagaacccaaaaagccgattcaaaaaaatatatcgactcggtagtttccccgcttgtcgaaaagggatacagctgggcatcaacctacggcaaccacgatagcgaggttaatctcaacccggaggatgacatgctcgaggaggagaacaaatacaccaacagtttgacgcagagtatgatctccggcgacaaggccggaataacaaattattacctgccggtgttctcacatggacagacgaataccagcacgccgacgctgctgctgtggttcttcgattcgaagggtgggcattattaccagaagcaaggagagaccgggcctgctgttaaaaggccgagttggattgatgattcggtacgaaagcccctatattggttcgggaaatgactgactggctgcattcaaggtcgttgaatggtttacgaaaaccaattccgaactgaacaagaagtatggcaaagccattccctcgctagcattctatcacatccctgcgcacgcgatgctggaacaccaacaaacaaaaggcataaatccgcacctgaatcccggcgtgaatctcgagcgcgtgaacccgcaaggaaccggcgaatggacttatgacggccaggacgtcaagttcatggacgcgctccttcacaccgaaggcttaatcgcgggatttagcggccacgatcaccaaaatgactggtatgtgtctaacaggcagataatagtgacttgaatgattcaaacgctaaatctcgcaggtgctttaaatggaatggatctcttgtcgatcacgatctaaccgggaatggtatcaatatgtgctacgggcggcatacggggtatggcggctatggaaatctggcccgcggtggacggcagatcttactccacgaggataatctcgcaaacgacaccgagacgtggattcgacttgaagatgggtccgcccaggctcatgtcacgctaaacacaacttacggccaggatacttatcctgctgttactaacggtgctgggaagcccgattcgcttccttgttcttggctgtgggttccgcttatgatgttctcgcggtggaagatgtaataagtgggttcttttggctataggtcttagattgctatattacttttggacctgatttatgaatgtcttgaatattttgaggatagaataattttcttgtcttcccgagtattttagtcacttctcggcctaaatggattatatacaattctatcttctgtacaatatgacttcctccactcccattcttgccatcttccagccaatccgcagtccaggggtctgagtatatacagccaataacgaccacctacaggtagatgtagcagaaaggaccagagacagtgctcatgagatcgcgcatagcaatatccgagccaccagcataaccaatgttaatgagggtgtcaagggtagtgttcggcgaagccgggctattcaagaaagtaccggtgccagaaatagcattcagacgattgtgcaggtccaagttctgccagatccaccaggtgcgatcaatcataccgtggtggagccagaaagcagggtcaccggggctgacgaagacatcacgggcaggatcaccgcccatggagtagtgaccgccaccgtggacgccgatgttgccgctgccggggacaccctgcatgttcatctggaagtcgtagatgtcgttgtggcgcaggatcaggtccacgaccgcggtgaagttagcgtagtcctggatgatcttggtggtcagatcgcgcttcaggcagcgagggttgtaggcgaaggggttctcgctggtttggctgccgccgccggggagcatcagggtgacggggcccaggttgacggtgtagtctttgaaggggccgctggtcacgcagccgccgccgttgccggtgggcaggtagatgatcgggtagtcgcccaagctcagctggatgtcgccggcggacgcgacggtggcgccgtttccggacatcgaggtgtcgctgccgtcgaagacttgggatgtctccaggttgccggcgtcggcggcccagttccagtagctgtggttatgttagatattggtaattttttttattttttattatgtgatgcgattgacttacgggtagtcgccggtgtagccacactcgttgcgcatggcttcctcgaagttgtagatgaagtaccggtgccacgcgaggaaggttcccgtgaagtgaatctccagagtctggttgatgtgggttgcgacgaagtcatcgtaacgggaccgcgcaccagggacctccgcggaaggagtcaaagaaggcaacttctgcaggcaaaggatggagctgatgtaggacttcttttgggtgctagagaaagtcctccaatcgcgacgaatgcgcagattgctcaaggaacaagtaccgcgcttggtaatgtccgagtcgctcgagacagtatcgatggtggtgttgtatgccaacccagccaagtcctcaagctgggactcagcgaccggcagggaggtggaagcagcggtgggagtcgcgctcgcaacagcactgtccacggcagtggggatagcccacgcctgcgcgaacaaagctcccagagtgagaatggagatggcaaccatggtggcgagttgacaagagcttgggagaagtgttgagccagaaggaatccgggcatgcttgttgatttaatagcttcatcgcccctatcttcgacgtccgagtctaactcgaagcatgcgcttcttgcataaaatccgcgggggtccataatctcccctcttctgctgggaccatttagggcaccgggccatacgttccgctttctccaccgggagacgccggcaatttgctatcgcactttttcccttaaactcagggttttcggtctattcagggatcctcttccctgcaaaaaaccgtcgggtcacttacggaccgagccttttagactctggggatcccatcaactccatatagggacgtatgacgagaaacgcatattactacaataaatctgaagcaaataggaatcagccaccacgtggtccccttgtcgcttggcaatttcagctaagcgacaatccctgtggccgtctagaccctggaagaatccaatttattgaatttggccaatttaacaacgtggtcgctttgggaaattaatcaaaatccagccaatctcggagtcacgcccctcctagtgccctagctgcggccaagtccgtaaactccgactgcaagctacctatgcaacccttcccagtacatccgaggggctcatctccttgcttttcttaccgatgatgctccgcctgctcattggccatgtttcgaatgacgaactacaacccggctgccgggtctgaggcgtattctagaaacctcttccattggagggaatgcattgtttccatgcaggcgtcgaactcggacggaacacagataatggcattgcatttccgttttttttttcatgtccgacgtcgcttgtgaaccgctcaaaggagattgttgacccaaagttgaagaacatggttacaagatgaaaccagatgattggcctgtggtgcttggtcgaagtagaatagatgaaaaacgcccctccatacgagactcacgccacccctcttggcttcggggaccatagcgataacttggtagagctgactgtaatgcgaatgcgaaacctatgatacggtgtacggggttctatgtattaaatctataacctttgggatgaccctgtcaatttggccccgagtataatccctgtctgacttctcctctcgatgtctccttcataactttttacgactagccatgtcggacggtccgcatagcagggatgtgaatcccccagatctcaatcaaggaccgaaaattatcatagccacggctatcactactttcgccgcgttattcaccgtttcggccaggttctacgtgcgcatattccttattcgcaatgtcggctgggatgactatacgatggccctgaccatgctgctgtctctctgcgggttcgccattatcgtccccgaggtgatatacggtgcaggcaggcatatgatctatgttcaagaaacgtctgtaaaggcaatgcatttgaattatgctacccagggcatttacatgtgggcaattggcctggtgaaggtatcaattgggctttttttgcttcgtttcgcaccccgaaaaggatacaaggtctttatctgggtggtcattggtgtgtaaaggctttatatcttcttctgcgtcttactgacgagcccggcgcattgcagttctcatgactctctacactgcgatctgctttttggtgcgtgccttatccccactttcgatcgacagcaactaacaatccgatcgatcgcagacgcttattttcgagtgttcagatatccgatcaaattgggatccttcggtgaaatcaaagtgcttctctcgtaaacaacttttggttctgacctatacaaacactggtgagattcgctctgtatgggtttaaataaacgttttttaacttgaacagcattgaatattctgactgatctgatcttcgcggtcctaccggtttttatgctacggtatgctatggtcatcgctctcttccgatgagatgctaatacaatacagtcatcttcaagtcaatcgccgagtgaaagcctctctcatctgtatcctaggcctgggagttttgtacgcgacttccaatccaatcccgtcataagccatgctaattcatctactcccttagtgcttgcgcagccgccttcgtcaagctctctatcctatccagctatggcagcgccggcgacttcctctgggacttttcaaacctcacaatttgggtcgtgtaagttaactagttatccaccactttaagccattctaacaaaaaatagcacggaatgcaacacgggtatcatcgccggcaccctcccaaccctcaaacccctcttcaagagaatcctcggcacatacggctcccagtccaaaacgacacgcgagtaccccggcagcaataaatataaactgcactcgatgtcgcgatcacggggcggaccgctccaatcccgcggccacaaaagcggcaacctcagcgtcatcgagtacgacgccgacccgcagaaccaccgctcccagctcgcgtctacgaccggctcggctgcgtatgcggggagtcaacgaagcaattccagcgaggagcggatcttgccgattcagggtgagggcattgttcgcacgaccgaggtgatcgtttcgcgcgagcagaatccgccacagatgtcgcccggcccacagacttcgccgaggttgaatagaatggggtcgctgaatggattacgtatcagcgccgatgatagggtttaggatttgttttttcttttgggagttatagggtggcaagtttattcatattgatacccgaagactacaacatacatgggcatataatctgtgtatctataataaaacgttgcccggttgttacacattcttgaaaagaaaaagagataactgtcttatctgtacattgcgctaggtctgcaaccgaggtactctccctttgcattccgaataaggggcaaagggatgacgatcaatcgatatacgaagtaacaaagtgattctgtattatattttgagtttgatatatgtaaccgtaacaaccgtaacaattgaaactttggaaccttcaaggttggagtcgggaaacccccgaattgtttccatggttcttttattcttggtacgctccaccaggtaccagactttcacccacacccgcaggaagtatcttttatatagcaattccatacaaaagctacctatttacagccttttttacgggtggttacgcctactaccccagtggtgacgcatacccaagcgtcgacccttaggggtccaagggtcttaagggttcagagaattgcgtgcaagtatcttttgtattgagttcctatataaaagatacttgattttacaattcgtgatccacctagttatgtagcttaccccaattaccagatccaggtcgggcagatccgaacccagattcggtatgtatcttttgtataacgtacccatacaaaggatacttgttaattttcctcagccttcggactggttagcgggaagcgcaccaatatataacgcgagcctagctccaataattgaatgcttctaacaagaaataaagtttaaaaagacactaactatatagtacggagtacggagtagttgcagaaacaaacgaaatgccgttcctttaatatgttaaacattcccattaaacttcaattaataaggtagactttctttgaattttatcatatcttgaaattgatcttatgccgatgatgtacttgggaagtatcttttgtattggccaaccatacaaaagatacataatttctggatatggcggtatttaccgctggcggagaaggtatgtgcgcacggttacatcggacattgctgttgcactccacttctcttctaaatgtctcacattgtgtcggttagcctaatgctaggatagtggcagcaatctggatcacttgtggaatcctacaacatatccagggcacaatcctaagcgcaacactccctaaccaggactcgaaaacgccagccctgaacctcatcgacacatcgttgtccccacttggtacagccgaagatataacccttgaaccaggacaattgagcatttctatgctacttgtccagatggcggcatacttaaagccacccggaagctgaaggatatgctggacgagagaatgctaacacttttacagtgtgaccgaaggaattcagatccagccagaaacaatcgtatttggatatcaagctcgggaagccactaacgagaagaataaaaaagaagatatcccggagagctcccatttcacatccacgcacacccagggacaacagcgcccctcccagcaacagccttctccccaaacttctcaacataccacttccgtccccagcgcgcgtggggcaacatattcgtgaccgcgttgacaacaaacaccacagccggcaaaggcagcggcacagcgagcttaccagccgtccacacagcaggcaccaaccacggcgctagaaccagcgggggagtgatggccgaagacgccgagacagaggcaggcagggcggagaaggggacaactgccgtaccagccagagcaaagccaatccattcgagccattcgaacacgtagtgcggatacaaaatgtatcggaagacaccacgagaaggtgggatgacgtaaactttgtggaacatgtttcctcccgctcgaggttggtcatctgcctttttggcagcgcgcttttcggcctcttcgcgccgaagtcggaacagggctgtctctgagtagatgttcccggccattccgatggcaaataagattacacccacggtggggaggagatcgcccactgcggagcggggacttccgctgctaaccatgaagcttgggataatcggcactgtatatccgcgcaaccagccggccagacaggcggagttgaaccaattgaagaccatggcgaagaccatgatgctggcgtggattggggacatgctaggcgcggagaagaagggcgagatgatagcgcggttgaaatagtgtgtgcagtacagagttacgatgaggatgttggaaacggggagatcagtgaaggagggtgcatatggcgatggagtgaccatgctatagatcaagttgatagggccgacaatctccatggcagaccaggcgatacgtcctgggatgttgaagatggactccgaggaggttttgcctgctgggtgccaggacaaaatccattgaattgctgtcacctaaatgtcccgagttagtctggtagcatctctccaaggcttcagggtcctgaccaggggaaagtattggaagcagcatataacagaggtgtagacagttggggatggagggaagagctccacagcaggaggcagagctcccaagcaagtggaaatagtcgcacccatttcgattgagagaagagatgaagggtgaagatggcggagggtaaacaggaagcttaaagcttatgtggaaggcggtgggtcccgggtaagcacttaaacttctgctttttgtttttcttttttttactttgtttagtcttttaaatcttttagaagaacaaagcctgttgggtatattcctgttgggtatatcgatcagtatggcaatttctaacaagatcggtgaattgtcgacttgagaagggcacatacgggacaattcaaacggggtcgtgcaaacgaaagtcctcctacaactacaaagggtaagacaagggcaaattaccagtttcagcaagtcggcgacaagactatgttcgtttgattctctacttgacaaaaatcacatgtgtaaataactaaggggatgattccacatagacagagtgtattctgtaccgtaaacgctaatgccctagacaagcaagcttgtgaattaaatcataaaaagctccggctccttaatttgaagtgtccatccgatcatgcaccatttccctccgtttgccagctaatttctcatttttgaacgcctcaatcttggctttaagttcggtatctagaaaggtggttaatactggtattggaacaatacctgggaaagaaaattacttaccagctactacatcctcaatcttcaatgggacacggttaaatggatcgtgggggtcactcaggagatgcgagcgaattgtagcgcggtcgatggcgatccgtgagctgggaagtatgacgggatcatccatgagggaatacattagaggatctaaaaaattagcagctgtcgaaaaaggatagttcaaaaagggaaaaataccgaggaactcttcagggatctcgcccatgtcttcctccgcttgatcatcggcctccttggcagcctggaccttcttctgcagctcactccagtggtgaagctgctcgggggatttcagcgaccactttcggataatatcagccgccttctcgaaattggctggcttgtaggatcggccatcacgggcaacagccaggatgaagttttccttgccgatcagattaagatagacgtcgacaatctcactcagaagagcgcggggattgaagccatattcctgcaggttgtccactcggagattggagctcttgggtcccaccattgcgtcgagattgtagtccagcatgtctgccagtcgctgcacaatttcaggcattgtgaacgagtcagcaagcgcctcagtgaatagcttgagcattgccacggtttgattagtcagttgcatgtagctcttggcgctgcgctgcgctgatgacaggttctcctcccgctgttggcgggttgcggcatccattgagttgccctgtgtattcagctcggtctgagtgttgtggatagtcttgaaagcaccgaaagattcatcgaggacgtaagtcacatcgtttagtagaaggttaacgaattggacgaagaaatccaggttctgattggcttgaagggacaacttctcccgatacagagtgttgggccagatgcatttgatgatctggaagatctcgtaacggatgttaaacttgtcgtagaattgggaatgtgttcccgtgaactctgcctcaatatagaatttcatgaccgcatggaggagatgttcgttggcaaatggcatgctgttgagcaagtcgactaaaacaccactggcgccaccagggcgcttccaggtgcctcggaacagaatggagatcagtccggctttcagatagggattcttaatataggtcgagcactctaggaatgtgatgcacagcattaccagctcatctccctgggtggccgtaatgatctgtggcatgcaccacatgataaacttgaagttactgacaacatcctccaagaagtactctggtagacatttgaagacttcgggctgctcctctggaagaggcagggtaacttgctctttggggaagttctttccagacacaagtctcagaagccacacggtaacatatcgcatgaatagcatagaacgagcctgccactgctcgtcgaacaacacaccttggagactgtatttgagagcgatgcccagttcgagcttgtctttgtacttcttcagggccgtatcgaaggtgcgcaattgctgtggattgttgagccaacgaacccgctcaagttcaaatttagtgattgtactctccatctgtcgcacatctttctcgagttgctccatctttgacgtcaatgattcactgccgtagtgatgggcggcgacagtcaggaagaatacttcagtgataaagtttgaagttccctcaaccttcttagaatagaaagcgtcggaggcatgctgatcggcattgattttggtctcatcccgcatgtcaactcgagaatcgcggtggagataatctgcatcaactctgtcgattttggtgaatgctgcatccatgaacggctcacagagctggtcgaggcaagttgtaatattgaacatgaagccgtcagaggatacttgcgcagggtcaacctgcatggcccgtcgtttgtggttgatgttcatagcagtcgcgaaccaatctaaaacacgatctcgagcctctttcgaagcccggatcaggtggttgataacatcaagaagatcagaactgagcatctgctgcgtcattcggagcgatcgctgggcattggaaatgtatgcctggtccctggtcttggggctagagaaataggacagggtaacattagcttgaaggggtgagaggcggaaccatggacccaaaagagtggctttctcgaattgagcagggtcccttgtgttgttgaaaatggacgattctgtgattgctgccgcgatggaaccgtggcgaacaaggtttcgaagagcctgaacaaactggtcagacgtggtccagggaaattgtgacgtttgacttacaatggcgtatggcttgtagtcatcgttaacgtccatagaagagagctgcgcgctcaactgctcgacggcagagataaaggcaggcttgacggagtcgtcttcgtcgaatcttctcacagcttcgttgataaactcgaaatcaattcctctatcatcctcggggtcgatgagaagatacgaggctaacgatgattgaggggaccattcgctcctacagttcagtcagtatccagtgccagtgtagcagcattccagagaacgaacccaaacatctctggcattgtaatcgcaaagatacaatagctcatacacaggcgccgtgcctcacacagaacctgatacttcgggtcatcatctcccgtccgcctcaatcccttatacagttttgtgatgcgcttccagcacggcagcagatagtcgagtggacgctgcttctcggcctttgacgcagcctctaggagggcctggtccagaacctcaacctggatgcgcaagtcctgaccctcatcctgcagttcgctccgaagcccaggcaagtatgtacggctgccatgtatgtcacgatgcccttcttccttgagggtcactctgaacacggcacttagtgttcggtcttcgaaggcctctatgctttcgattttctgtggcggaggggtgctcggggctgagggagcggcgggtcgtggttgctctgatgaagccgcggccggtgtgatcttgatccgcttcccttctgactgctgcggggttggtggcgcgttgaaaaggcgactcggtggctgcaccgacagtggtgattgtgacggagatgtgttagatgagctctgtgtcgattccgaggcaccgtcggaggactggcctgggtttgagagctttgcaagtcgcttgttgcgaatcttttttttatcaagatagatgtcagtcctcgagtcgagtcactgcgggggcggtatagcttcatagctcgagtacaacaagaaactaaccttgtctgcgtcggaaagtgtgtccgacatgttagctgatggtcagacaataatctgctccagagaggttggcaagaccgctaatctggtggatcgagtcggcagaatatcaatattgtcgtgacggtgtaggaatcataaggcgtgaaagcggaatcaggcagctttaaagcctcgaagtgggggcaatggagtctagaatccgcagatgtatgtcgctggatgagcacttctgattccgtgatgatcgccgagattcgcttttgttctgattcgagattcagcgcggtgatcgaatttgactaagcaatccatggttgggcgtgggatccggggtacatataaggtactttggggtttgcgctaactatgcgcaaaatgccaggtacctatcaagtcactttttttttcctttcatacgttcgaaggtttaggttgttggaacataggaacatcttttctatgaatatactgttctagatattaaaaattggataacttgatatctacaggatttgtttatgtttcagatttatggccgcaacctcgacgaacttttgtgtgacactatatatatcttcatgtattcacatcaggacatgacatcagaaacgaaaaccaaagattcttaaacatcaggggaaccaaaaagagaaatttagcaagatcctaaatgcatttgaaactccaaaaaaataaaatgtacagttgattaactgagacccagatgccacctttgtggatgggctaatgatattagagcacgttcttttgcaaaaagagcctccaaaaggaacaaaatgtcataaaaaggcgcggcgtaagcctccaagtccgcagtgcatttaatatctcaccttcgtcttcagttggtccagacgcctgcagctcggcatctccatcgcacgagccttcttcattttctcaacgtcagggaagagccacccctgcgcatcttgcagccttctctcccgctcatgggcttcggcgtcacattcattccgcagtgtcctgacatattccacctccacgcgcgagtctagctcgcgaaagttccgggcactatagctatccacatcgagggggttcacaaagtagttgaggttgagtttcggggtcacgcggccgagggtatgcggggagacgggggtatcaaagcgataggagggtccggatggggttgaggagccagagaagagagaggagaggagcggcaggataaatagaatgataagcggcaatagctggcgcaggaaactgcggctatcgatctgagcttcctgctcggtggctgctgcgcgaggccggcgacggggcgcctggcctccaaactgatgcactcggaacccggggccacctcccatgttgaagacgaattgcggaccgcctatagtaagacaggattagctcgagtaaaacgaatatcagaggaagctgtagtaccgaatccaccaccgcccattccgccaaatccaccattaaagaaccggttgaacatttcctcggctgagacttcctcgttgaatctttggtcacggccgaatccaccaccgaatccaccgaagggcgacgcgccgctcgaagcgctcggtccgggttggaacctgctatcaggatcgccgccgaatttgtcgtatttcgacttcttttcctcgtcggagagaatctggaaagcacgcgagaccactgccaccgcgtaagaatcaatatgtcaagagtttggctaggggtgctcattgctcactcttaaacgcctcgtctgcgccctcgtgcccgtttttatcaggatgcgtcaacaaactctgtttccggtacgccttcttaatctcattatccgttgacgagcgctcgaccagcagaatttcgtaaaaggccgtaggctggcatcttcgaatccgaagcacagcagctttctgctcttctgtatacttgcgatcctggttaccttgcttatggtcgcgcgacgtcgcacctccgcgtttggcgtcagagccagatgccgaagccgagggcatagcgaccggagtttatgggaaaaatcggacagatttcgaatcaacgtttgcttgctggtgtaggagggaagagggggtcgagagaatcttgagggcgtagacggatagaggagaagcaatcccgcacgggatacggtcgggtcggcagattaatcaaacgtgtgatgagatggccaaagtaaaatatcggcctgatcaagacgcagcaaaatcagagtcacaggagtggctgattcggcgggcatgaattggggaaaaagcgtggtcttaggtgtctttgccaagcggcggaacgtcaattagttacattggacatcgcgataacatcactcgccaacattgaaaccgatagacttgccaacatccccaagtccgcgatattcaattgtgagtgttctccaggtcaaaggtcaattaaagcacaccggtcttatttatatacctgcagcaaacgcaatccttggccgccaaagctcgcggtcttccggtttcatcaaataagtcctcgaagctcaattcctcaccatggcggacgattcaactgtcgaagagaccaaggagacattaatccagcgcttccgagcctggggtggtaagtggtatatgcatatgaatagcttggcttcatcggagcgtccaaacaagcaatgacgccagtgagcactcactaatgtcgtctctcaactgcagaaaactcattcccacccacattactcgcctccatgatcgcagcccagcacatgcgccctttccagttcttcccgatgctctttccgcctgtgctgatcttctccagctatgccaacctgcagggcttcaagacggacactgccggcatcagcggggccgtctcgggactgtatctgcttctcgcagcccgccgtcgacagccatttatgaagaagctgggtgttcggggcgtcgtgcgcggtgcgaccatgggtttggctttggtcaatatgatcggtggtgggttggcgtatactctaggtaggaaggaggaggaagaggatgcgtcatgatcgagtgacaacttataacgacgcgaggaccgcgatgccatgttggtgtcgtggtctgtttgtataatacgtgtatcaaaagttggctcagttgtgcgtttggcacgtgggtgagttcacgactcggtctcggtgggcatgggttttatgaaatatatgcattatcactacgaaatacacttttggagatagactgtaagagtctccagtggctaccacgcctaagtaactacactttagaatttccagaatacagatgctccgacagcaagaactgccgcacctgttcaggaaccagccattccaggtcctggggcgccgattgcgacgcctcacgagctctagttgaactcacgggttgatcagtagggcgacggccctcgacaagctgaatccggtcagcccattccctacgggcgccgtcgctatctcggtcacccctagcaagggccgccaaaaattcttcctgctcctctctcccaccccatccatcgctcgggcgcatagtcacacgtagtcggtgctttgaaaatagaggcgctagagacttcaagttatgttcaggcggatagtacttgagatcgaagatccggatcaaagtatcgtaacccatcagatgaacctgttccattggagtggggtaagaatccgatgcctcgatagcagccgccttgtcgatgaaatagggctttttggtgacgccgatatcgatcaacggaatattttcgacggcatgttcgaaagccggtgccgatgcgagttgggggcggagatcccgagcgaacagctccatcatcgcgagccgatcctcgaaggaggcaggcttggatggcttgtctgcattatggattgcgagaagaaggagcagacgacggcggggtcgggagttttctagaagtgccgtgctgacaatgcggaggtgggcacgggtggggggattgaacgacgagtctaagacatagagagtctctgggtctgcggagggaccggatgggatggttgttaggacttcgaagactttggttgaggttgtgaatgccttcagtcgtgaggcatactgggttcggagggcttggaacgaggacatgcttgtcagttgcttgactgggggtgatcgtctctaggaaggttgcgatgcgggccgaatgcaggtgatcatcgcgataagatcatattgtcaccgccttccaaatttggaagatttactctatgtaaccgacattgaagatattccagcagatggctccatgatactccgtacatgtatttaggatcttctagcggggtcctaagcaagttccattgctactccgtactccgtccaatgtgaatattcctagtctggagagttggagggtacaggggtacgaggcaaattgtaactaatttccaagtgggatgtttcatgttggaaagcttctccgtgccgaccacaaacaggctacaacatacacgggaaacgggaaacgggaaacggaagcgaaacactctgaaaagataacccaagtttttccaaggaccgtgcctaacccaggctagacctcttttaatcaattcatccgatacacttcttggcggattcgagagatgtgccccaccgcctcccacagagacggaattaaagtgcattgtatactccatacatcttcacttttatatggaaagagtagcatttatactgccccgtggagtccagaatgccatctttatctccaacagcaatttatatcccgacaatggcggaagcggggaccctggggacacgggtgggagactgctttatgtgaaaccttcccgtgcttgtattgtgtatatcgcgtattattacagacagtagaacattgaaacttgaacttcccgaaagtgccgcggtcgtaatttttttttctctctgaatgaagatcgtctggattctcgggctttgtttcctcattggaacacatagttatatacaatatactccgtacacaactagtaggaggtacattataggcctatagacgtggccgggtattgtcagacttttctgcccctgggcacgttcatatatgaagagtccgtgccctaagaaaccgtttagcgacaggagtacaaaagtacggagtacacaaactcgtacacaaactcgatggcctaatacccccttttaagcactctatctaaagaataggggcggatacaaacagcatgtcagtgacgccaccgacgccacatcaccttaatccagaaagcccagtcgctaagaggctcatagggtttgccaatatcacgtagtgtgttgtatatcttacggtgagattaaaggtcacagtccaagtgcccacgggctgcttgggatcaatgccaatggtccaatgagagcccggttcctgggacggtggacacgccatccatggattgaccgcagatccaccggtattaccacggttggaggtgaccaatagggaattaatttaaaattgatagtgtagagtgtaattttaaagcgaaattggaggaaatgagttaattaccttggtctccatcttctctgctctctttccttcttcaagctggcatctcttgactacttcttcttcttttcttctctgtgagaagccatacgttccttccttgcgaattgatttcgcatcttgctctgtcgctctttcttcagacacacactcacttacacacacactcgctaactttgctttgcattcttgcttttgacatctctcgtcttacccctccactttttcattgacatccaccgtcgtaccaataacttcatcatggttgtcatgaacaagttctccgttgcccttgtggctgctctggctgccgtgggtcaggccactcacgagggtctccatgcccgtcgcatcgtggctcgctcgcttgcccctgtccccgaggcctctacggcttctacctcgaccgtcctcgttgtgcctactcctgtcgagccagttcctgaggctacttcgactgccgcgtctgctcccgctgaggagacctccgccgtggagtcttcctctgccgtggcgtcttctgcccctagctccattccttctgttgcttcgtctgtcgttgctccgtctgtcgttgccccgtctgtcgtggctccgtctgtcgttgccccgtcggttgttgctccgtcggtcgttgcctcctcttcggtcgtttcggcccctgagttgagctccgcgagctctgtgcccgtgttctccagcaagcctgtggtcacccgcactcccatcagctctcgccctggtcttcccaccaagtcttccgatgccctgtccagcaccgtgtctgctcctgctggcacttccgcccctggtgaggctgtcactgtgacttacaccgtgacctctggcgcctcgactagcgtcatcaccaccaccatctacaagaccgccactgaccagtacaccatcactgccgtacgtgttagatctgatatcttatgcttggtacttgtgaactaactttgatatagaccgagtctggcgctgatgccgctgccactaactctgctgatgcctccgccaccaactccgctggtgcctcggtcactaaccccgctgaggacaccacctccactcggacctccactatcaacagcaccaagaccaagaccgtcactctcatcgagatccccgcttccaccagtgctgccagcagtggctctgattccagcagcggctctggttccggcagtggctccggtgcctgctccgccgttaccgttaccgctactgtcactgaaaccgtgactgctgtatgtgctgctcattcccctatcttacacgtcaaatattaacattattctagggcgccgtcgagacccagtccgccggcaatggcaacggtgagggcgcacagagcacctcgactgaggccgctgcttccaccgagaccgcctcggtttccaccacccgcacttacactgcatccacccgcgttcccatcacccgcactcctactccttccagcggcttcgctacccgtactcctaccgccagcgcaactgtcaagcctactacttatccctcggccaccagcacccccactggcgagactttcttgtccaacctgcgccgctacttcttctaaacaacactgctgatgtgaagggggtttccacctccacatggcagcgagttgcgagcctatcgatggcctgagagaaagttccgattcccttctactcgcgcagaggcgtgctggtactgtacctattttttgccaagttccggtacaaacggattcaatttcacttcttatttacgctccattttttgccatgtttcttcttttcgacttctattcttgcaatggtcttgtcatgctggattttgcattggcccacgttttctctgcttgttacgttttgcaggcatcttcaattcggactgcggtgccaatctccaacctcatgacatttccttgcgttacatttttactctccaatgtgaaattgacccattcatatgaccggtttccattggactcggaacattttctcacgtatcgttatgatgggtggtgacacgtctgttttatggactggatcttgcctcttttctcttgtgttaatggaaaattcatcttgtttaatctttccacatttcatttgcgaatgatctcatagttctgtttttagtcttcatgtttttctttccacgtggaaggccgatatcggtatccttaggacagaacctgaattgacaaggctttgcctgtttacgaaatgatcactactccctttaataatttggagatcagtagaaatagagtgaggctgttcatcctggagagttagtaaggctggcctgtggatcagtgtcgatcttcttgcgctggcagaaacaacacatagttgacgtcgacatacagtctacggagtaggatcgtgttattcgtccattttagagtattaatgtacgtaaagtaggataatatacaaaattcgaccaccaacttcatcctagaagagctcacggcatcacccgtcgtcaccacccagcttggctccgctcagaatggatactgacatcttctatggcatcgaatccaacgcctcaaccccttccctcgcaatcctctcccgcataatttgccattcaacccacgtcacaccctgcaacaaacaatccgcaagatcatcgagtttccccagatcaacagccgccacctcgtcccccatatcagacaaaggagatccaggcaatggagaaagagatccactcttcaaagcccgagaccccttcccttttcccttcttcgacgcctgcgtctggccctgccatttccgcagatacgcacccgcaacagcatgcagggcaggacactccgatttatccgcgagcacgatcttattatcggtagcagtacccagctttaattccttaagaccgccgtccgagtctgggggagcattagtctgcatcgcagcagaaagccaccgtccaacaagatcaatcttagccttcttcacttctcgcgcattgggtttcttctccttctctttttccccgacttctgatttctcccccgcgtctccctttcctagaactgacgaaccttcaagccaatacctgactacccgcctcggctcaacaccccgaataaccaaatcagcgatatccccgcccctctcctgccgcagcgtatgcagaacagcatataacatgccctccagcacgccaacgcgcagcgtccactcaagcaccgcactcccgccgcccgagcggaagcgctggcgctcaatgagcacgtgagtggggcggtatgcagcgataagtgacgagatgagggtgtacgcatatgcagcgtagacgtctggagcgaaggcgtccttttctttttctttttctttcgtaatagatttggcgatcttgccgggtaggctcttttccgtagcgccagcgccagcgtcacccgaccccggtgttggtgttggtgttggttggatcacaccggtcttagcccccggtacgaggttcagagttgatatctcagaaatcgcgagtcggtgccaggctgtcagctccgggggttggaggtgggttgttgctgcgtcatctggagctagacctgaaaccccggagcctccggagcggggcacgcgcagatgcgcgaatgcgaggttctggatccccatgtcgatgctgaggatgctccatggttgggattgagcgggatttgattttgacgagtcggctgacttggtgttgggatttgtcttgcttgggggcgtttttgggggatctagccgtcgatcaacttgtcgatcttggtttagactggggttggtgttggtgttggcagcactgggactgggccttggaatactagtgataccctctgcaacgccatccacggcagccggcagctgcagctgcacctgtgactgcgactgcgattgtgactgtgaatgcaacgtcaactccgctgcaatgcgctcaatgagaacacccttcgtaccggacgattggatgcccgttgcgcgtgcgatgcgctgcaattgtgctgatttcaagcatgcgagccaagggtgtgttggggagtacagcgctgcagagagacgcatttgggggcttgtttgtgcttgttgcttgctaggggtggcatttggtggggcggggtctgggctcctggtacgaggtgaatctcaaattcctataacggcagttttaggctggatgcatggacatttttgggaaatggattctttgaggtggatgggtgctgatcggtgcacggaccgtcgacgctcacggctaccgtggcactgggtcggattgagtttgatttttgttatttccaaggttctttctgaagtttagttgcgatagagtagactgtcatttcttagatagacctctactatgttgtagtagctgataataacaagtaaaattatatgcgccttctatttcccagacgaaatataacaccgagatcaccttgtgttggtagaacaccaggtgtgaataataaaactccccccataagaagcagtaaatgcgcgctgaaaagccaagtcaaacaaaacacttgcgaagacagcaaggcaataaacaaccgacatcaaaaatcctccaaaagcaaaagtaaagagcaaaaccaagcaagaccaaattatacgaatgctggctgctcaagctcggtcattgcaatctcatctcggagatacaacaacggagcccaaacacgccagtgcagtacacccaaatgagcaagacgtaccccaatacgctcgacatccgactgctgtggcgtcaaagccagcgacgaagtattgttcactgacccagacgcagccacagtcccagtctgaggcacagtagtacccagagtggcagacaccggagcccgctgcgactcacagatcgccaacggcgaaagcggcaagtatcgacgagccgctgctatcgtgctagcaaggatcttgccacgcatgctattttggaagaaaacgaagagctcggactcattcgagagatgccactcgagcgcttcctcgatgggaacgatgacctcgtccgtgacgacggggtcgagctgcagcgcggcacaggcaaagcgggcaatctccagagcaatacagcgcatattttgcgtccagcgctttccgccgcggtggtcgggatcgtcctcgttgttgtctggattgcttgcgatgcggttttccaggtccataccgttttccattagggaccagatgcgcgaccggaaggtggagtaggtttcttctggggtggagaggtaacgcttgtgcttgttgatgtaggactcgaagatgtaccaggcgatgtcgaggttgattagattttggacggttgagcggagctgccagaggcgctcggagtcgaagaggaaggtttcggggaagtcggcgggaggggcgaattggagcagttgggcggagattccgcgaaacagagcttcgaggggtttgagattgctttccgtttctggagttggggttgtattttgggcctccgcatctgcatcgtcttgacgggcttggtcacgcactgatatgtaccagtgtcgggcggattcgacctggaagccgccgcgattcattttgccttggaagtattcttggagaaaggggactgtgtcttcgatgaggagaacgcggaatgctcggatttgatgattggcgacgtcctatcaagtcacgaattagttaacgccgcaagaacagagggacttgaatgtgacataccaacttcatagcctctagaatagagaacaatgttcgcagaccgctgacaatctcatggggatcctgcgactctgaacccttttggatttgatcgaccatagaatctgcccactcgtctcgcatcggagcacaatgtgtttttagtagtttcgctagccaccgagccagcgtaagcatgtcgagaacgcctttgcgtatttgctgcatcagcaatggaacttccaggttttgcatgatagttgggtgatcgcgttccggaacaagggtcttgatgacgtcctgcaatgtctcgaacagggcgggcaaacgcggatcgaaggcgtgtcgagtaccatcacttgattcgcttttctcggtggcaccggcagtcgcggcgtggtaagagtaaatagtaatctcggcggccaaggcatcccaataatccgcggcttctttccgcttgcgttggcccttctccccgtccaggtcaggcttgaagtgcaggtcgcggtcgaagttggcgtccatgcggaggttgatgttgctcatgatacagggcagatcaagctcgctaagcgttttcttcgtgactggcggatatctccgagccttacgcaataggcgatgttcacggggatctagtcccaaatcttggggtatactgatagcctccggggacggggatggctctcggggccgagaaacagcggctggtaccggtgaagtagattgttgagccgcatgaggataagcgaagggctgttgacggcgacgaagaggatggatggagggtcggtcgtcatgattgtgagaatctcgcccctcgttcttgtgatactctttagaacgaccatttcccgcaccatacgcctctagagggccttctgcgccctcctcctgggtccgggcttcttttgtgccttgtagatccatagttaagcacgatatatctgaacctccctactcagacagtcagataaaaggaagatttcagggtggcaatggcgagaccacgccatgcacctaaccacagaacaaggcgagtacgcccctatggaactcctacaactcacaaatttaatgggcccctttttgcctcaggcaggcagccaatccgcattcaccgaaaaagtgatgcaagtgagctgtcaattcctgtggagccgaggattgcttggatctgcgtcgatcgcctcgtggttccgatcagggggagaaggtcaaaaaggggtggagattcaaacgtttttaaaacaacaaaagggtacggagtataagaatccgaataagagagaatataatcttccaaaacaaagaggtgtagagtatgaaacggggctccgatagcagcaaaccagggtggggactccagtgtatactctagggcagacaaatgcaaattgtctcgagagagcacaaggatgcaggacaaatggacaaatcaaaggaaaaaagtaaataaagcaaaggagttggcaaagcgaccgggatgaactgatatagcgagtgtatcccagatcgacaaccggattcgggttgacgcaagcagacattcccttctgctgctacccgcgagcagactctcgactacctgggagatctcaactgtcacatctttccatttccgatttgaacttgcatctgcatttgatgttgcttttgggaaaaaaaggggggtactcgcctcactttgaactttgaaaccagtgctggccacgtgagggtgaatctccttttctcggggaaccactggatgcagtcgagttgcgcattaccaggtgcatagtaccctccagcttgccagagaagtactcagagaagggttcacagatcatcgagaagagatgaagcagggcctctggtctggatcggaatgtttttggatgtgaatgccttggtgccttatagactttatgcctgataaacaaggccctatatcccttgagacagccctattctacttctacctcaccacttaacttccaccaattgagcttctcgtttagctcagatctaaataaaattactgtgattcatgaggcatccaatgtttgtagacggatatgagctccgtcaagcacccaagtccactggtcatgtctttggcctcaataacctcgctagcttattgacacccaaatctggctcaacaacggcctgctcaatagctcaataagaaccatgtctgacaagaaataaaataaaaaggaaacatgatttccacgtggaatcttgtctgcatgagcatcctagatctttactaggcagtatcatctcgattatcttcacaaggcgtgcgaagcacggccagtttcaatcatgaatatttccgcactactctacttctttcagatcctatgggcagctcctgggcttgtccgctcgcgaggaatcggttcatacaatacttcacgatttgaagtacatgccttaccaggcgtttcggacctaccatccagctgggctggtcgccttccggttccggggacagaggatggaaatgagatctttttctggctatttcaatcagagcagccggcatacgatgacaatctgatcagtaagtctgattggagggacattcaaaggcgatggttaacaggctggatagtttggttcaatggcggccctggctgctcatccttgataggtctgacgaccggcaatggacccatttccttcgatggcaattcgactcgatttattcgcaatccacactcatggacaaagctaggcaatgtgctttacgttgatcagcccgtcggcactggctactccacggccagcttcccatacccggttaaggacaatgttcgggtaacgacagacttcacgcagtggttgcgtggcttcttcgaatatttcccgcaactgcagtcaaagcagatccatctgatgggggagtcatatgcgggcatctacataccctatttcgcatcggagcttctcgacggcaacaattccctgcctctcaatgtgcgttctatgtctctgggtgatggatcctggggaaatggagcagccatggcggacgttgcaatgggtaaatatatcaggtcacagttgggcttcctccaaatccctgaagatgttctatctgtcttcgacgaagccgataaaacctgcggcttcaacgacgtgctagcaaaatccgccgtataccctcccctgggtaaaatacatatccccggaaacccagaatacttcaacctccgacgtcgagacttgacaaatgccgtcaacgcgacatgcgacatctcacccaaaacccccgaagcagtccacacatcaatcttcaactcaacttgctacggcccctgcgccgtcttctctacagcaagtgattacctgacagccgtattcaccaaccgcaaaattcggggctgcttcgacatctacgacgtttcccacgactgcagtgccatttcagagctcccactaatggcagagtacttcggccgcgcagatgtccaggctgcccttcacgtcgataatagcggactctacaacgcctgcaactccacaattctgggcacgctactatcagtgccctcccccgtgccgccggagtacttcatcctcccgtctctggttactgaccacaatatctcgctccatatctactctggcgagtgggacatgatgatcaaccactttggcgcggaactctcgctacaaaatatgacgtggggtggtgctcagggcttcgcgcagaagccggtcaaacctttctttgcggataatgccgcgccgtcggcgaccaagcagctcctgctccaccacacaccggttgctactacattatcgactgcgaccccgactgctgctgctgcgggtacgtggactatggagcgtggtgtttcgtatcacttattccgtggggctggccatagtgtctttgtgaataagccgcgcgagatgttctcctttgtgagggatgtggttgttgctccgagggctggctgattatagggactggcgcatcttgggttctggagttatcaaaattgggttgtgatatgcattttttagaaaactttttattttcaaaattctagggcacttggacttgtaacgagaacagtaatggatgtcgacagaaatgcataagaaaatcgcgagtgatcgtcgccagtcagtgccaaaaaaaaaaaaaaaagggaccataaattcagctgtcgtatttagtaaccaattccaactacactaggatgagcattgggatcaactacaacatacaaggtcagtactacctaactatctgatgcctctagccccaacggacttctcgtccgccaagcttttcagttgcattccaactctatatagcaatccccatagcccttgcatttcccgaattccatcccactaagcagagccttgacagctgtcatatcgcgagagaaacctgagcccagattcacaataacatgagcaagataccattaggataggaacaagaatgaggaaatgacgtgttaagcatgagtacattactccattactccatggctctaggatcgagtcttgagttttatgaacataatggaaatttaatgtgttgtaacttcaaggggttttctgtagtacatttctgatttcagccacaccacttaagtaggccaatttgggaataaattgataaaggactgtaatatagggcctcccttggatgcgacatagcctccgaacaaaccgatacatcaaaacttgagagttcaagctagaatgctatttgaaggggcgttatcttggctactgcgtattactacatacatgttgctttcattcttgtaagtttgagtgttatcatgctgtagaatgccggtggcttttgttcgatctcgtagcgatcttctaatttaacgactcgatggtaattcttctctatagctaattcgaatatacacaaatagccgatatagaagcagctcattactattgtttatattgatcacatgtcaaacaggtccgatgttcgggtgtttgcgtagaaatagaatgcgatatcctctatacggcgatcatccaatttgatactcttagaaaaaatggtatactcgccccttacagagccgcatactctactctatggtattctccttggtcacaacaaggccctatacagctagggtaagctattgggggtatggttgatagtcgtggaagatcaatttgattcaaggacttgctctgaaaaatctggaaatatttaaggagtagcaaatcccgtagtatcccgcggcgaatcagtttacttacgacatcgaatttgtggcaacagaacaacagaagccatgttgcgaaaactgttcacatccgccctcctctttgctgccctgagcaatggacagacggctcctgacctcgggaccgcggagacttttgctgtcctcggtggctcaactgtgacaaatacgggcccaacaacgatcactggtgacctgggagtctcgcctgggactgctatcacgggttccggtcaaattacgatcattggatccgtacaccaagctgatgcagtcgcaagtcaagcacagaccgatctgacaactgcatataacaatgcggctggccagggaccggccactgcaatcgcgacggaactcggcggccagacattgattggtggtgtatatactagcccaacattcgggcttaccggcaccctcacgcttgacgctcaggggaatccggatgcagtttggatcttccaaatgacatccacccttatcactgccacggactccaatgttgttctggccaatggtgccaacccttgcaatgtcttctggcaggtgggaacctcggcaaccttgggaacaaggacagctttcgtcggaaccatcatggcagatcagtctatcacgttgaatactggcgcaacgatcaacggacgggctttggcccgcattggggcagtgacaatggacaccaatactatcaccaatgcggcttgcgtgacaccacccacaacgagcactactgtgtcgcctacgacaacgacgacgacgacgacgtcgactactacgacaaccaccactaccactaccaccactaccacgccgactactacaacgacaaccaccaccacgccaactactactactacgacaactaccaccaccactactacgccgactaccacaacgacaaccactactacgccgactactacaacgacaaccaccaccacgccgactactacgacgacaactaccaccaccactaccacgccgactaccacaacgacaaccactactacgccgacaactacaacgacaactaccaccaccactaccacgccgactactacaacgacaaccaccaccatgccgactaccacaacgacaaccactactacggcgtctaccacgacaactactggcaccaccaccaccaccaccacaacatcatctaccaccacgtcatcgtcatccaccacgacgacaaccacaacaacgggaaccactacaacaggaaccaccacaacggggaccaccacaacggggaccaccacaacggggaccaccacaacggggaccactacaacggggaccactacaacaggaaccactacaacgggaacaaccacaacgaaaactaccaaaacgaagactaccaaaacgtggtctaccaccacgccatccagcacaacgctgtgtactaccactcctaccacaactatatgtaccactacggtatggacaaccacgacgctgacgccatgtacaaccccgacgtcgacaacatgttcaacctcgccgtggacaacctggccaacaagcatgcaaaacccccacaaccaaggctgggaagaacacgacagtaaagactacaaccaaggctgggacaattacgacgacaaaaactacgaccaaggctgggataatgacgacagcaaagactacgaccaagactgggaagactacatccaagccaatacccaaggctggacagacgacgacagcgcgtattaagccgacctttgagaagagtcttctgatgggagattagatgggttcagatttataaattttgggcaattgttcaatgggaatcacccaagatgttgtttcatccaagaaaagtaatacgagggataggcgttgttggcgttagtttacgaaatcaaaccggcgccggaacaggaggtaattgcttaatatgtatcgaatactcatgttttaataatatcttagtccacttgctatccttttcaatcaattgtcaacaagagattctggttcctactacctacgtcatgatctacttccccgcaaaatatggggtaaaccaggtgatctattgtatgaccacaaagtatcagcccacctcggtatccatcacttgccttttctcttctcttctcttttctaaacttccctcctcttctttacatctcacacatctcacatctcccaccatgacaaaaggattcgcaaccatcacccccgaatgcgaggaagtattcgacgaggtcaaaggaaccgacaacttaaactacgtcatctactcagcctctgcacacgacaaaaagatcactgtcgcggagtccggcaaatacaaggactacgccgagttcctctctcacttcaaggataacgctcccctatacgccgtcgtagacttcctttacgactctcccgccggtgatggccagcgaagcaagctagtctttatcacatggtatgtatagacaccctggatcacattaccctgatctttacaatcgtcaaagggtacatggtactaactgttgaattgtatgtagggtgcccgaggccgcaagcattcatgacaaatcttactacacgtccaacaaagatcacctcttctacgccctccaggatatcagtctccatgtcctggcacattcacgggtggatttggaccataatgcaagtatgtatacccgcgaagcattgactccatctagtatgattgtactcgaaactgattttttggtttctcacttagtcctggggaagttcaaggctctctagaggggcctttaattttcttctcgaacctggtaaccgctatgtgaagaacgatccacagatcatgcatggtctggctatgctgccctagatacatatttcgtattataatatttcctatcttcaatcgtctacctctaccacctgtactacctgtactacagtaggaaaagcatagaccgaacataggacttttctaaatgacgggataaacgtcttttaatttcggatttattgtaccaaataccaggttcttccccaggatattaaccccgctgatgcataagaaacagaagcaaaaagcgctctaggtgtggtcaatggtcaaaacagagtcaatgacatgcacgatagattgcttgtacctcgattctttcaaaaaatatcaacccgctaaatcatggataaacagaatgcagatcgagaattggactgccagagcagttatagtgtgacaaggaaccacaagagtaacgttgccggcatgcacggtagattgctcatagtcataatcataagacgccagataaatgagcatggaggtagtcatgacacatagagaaattgagttctctgagacggagtgttaaaatttctcatagtcgcttagcgacggaagaacggggcttgattcgacgagagaagcgaatcagcacgttggaagacatcgccgtcgaagaatctgtcactgtatgcactggccggcgtggacgggacagtggcctgcgcagcggggccgagcgctgcactcagcggagtggcaggtacggtgaccgattgagggggcgacatcgtattgagttggaaagaggggttgttggtgagggcggatgttgagacggatgtttgatggtgctgcaggtgtgaggcctgtagcagagggccgtacaaggcactaggaggggggtggcggtccgggtctgtaagataggcccaaggagatacctcgatcaggcggcctgcttcccggcttgccttttggactgggcgtaggaggatgacgacctcggcaggtaaaagctgcatacctctcaactcacgcatctcgttcaccaggtcgacgaaggactgcatgaatgatttgcatagctgccagaactcgcgttggttgcggagtccgccaccaggttctttgattttcatggtcgatagacgctgtcctagggcatctgaaacttccaggcaaaactggcatcgacggatgaggttgttccagaggatttggattccctctgaatcgcgtgagtgttgagcagcttctagacaccttatgaattgccgacgggccaatggaagtgcaccgtatgcggcatgatatgtagcggtcagctgatggaagatcttttcgaatattcgctcctcttcgttttcatccagtccagtcagtgtgttgaaccggggagctccggaagcaggcataggagggaaagtttcgcctgagcgagggatggccagggaatgtggcacagatgtgttgatcatgtttgatctgctgctcgagcgactgcgtgcgtacgacgttgagaaaccaggagagctaatgctagtctgattagaagtcatagtcatggggtactgggggtgtcgaattgtcgtgtcgcttcgcaatcgtcgtgtgggcgggccaggatctcttgttggagtgaccagcgaaagttgagatcggtctgggacagaggggagtgggttacttgggccaaccaagcgtcttgtagcagagccatgtctgttgatggtctggagcggaactttgagaatagcgcaagcattccgtagctccgccaggctgccaaacatcgtcagcatcagcgatcgtacatagcacggatcgccattggaaactatcttggtgacattgttgcgtagctgcgtgccgacgtgaatgtaggcggcgatgcacgtctcgcattcacgtttaaccgtttcggtgaccgatgacattgactctgggtcattgcacaaagtatctgtcgctttctcaagagcatcgttcagatggtcaacgtgtgaggaagcattgtaaaagacaagctcgagactgtgccgtctggtgtcatcatgcttgatcacgttgatcaatgtatcgatgtgggaatgaacttgagcaagggcaaatagaataacttttgcactcttgattatcggttcatcggatccatgttcacccttgtgttcaggtagactggacatccgattaacccaaccatctcgcggacgccgacgctctctcgggctggtgggacttgggggagtattgtcatttgtggctattggcggtgtaggctgacgcggtcgaagcacagatccatgactgagacctcgtagatggctgtttcgatatgggagcgtttcatctaatgtacctaaatcggtattcttgcgactgattagtcccattcttttgctacgagcaacagatgacccttggattatgccctcgctgttgctccggttgcgctcgttaccaggataaggcgctacgccaggtctttggagaccaggcatatgataagtagcgccttgttgtccagaggccatgcgatagtgtgattttaatggaatcggcggtgcccgagatattgatggagagcgagacgagcttgctgagctatcaccagtgctgggaattactggaaaccgaccacttaaattccgctttgaaggtatcggcgttggtgccggtttagcctcaaaagtaccatcactgcgttaacaccgagtgttagcttatatccaccccaggaccgtaagatggacaaaccctgtatcaggaatgatttctggctcgggtgtactcgtctgttgtcgcgttttcataagaaatctcttgagtttggtcgtggccgcaacttctttctcgttgtcggtcatcccggattgtgtcgtctcattttcggtttcttctagaatttcacgtagtggctttcgtagaggattcccgacgcacttgaaaatttgaagcttatgcatctcggagaggccagctgggaggtcgatgaggcggttttgcatgactgacagaactcgcaatgacttcaatttgctgatctcatttggtaactccttgattttatttcggctcaaatcaagaatttcgagtaatggtagtttgtaaacctaccaagcaggattagcgccatgcaagcataaagcaaacttatcattacatactccttttgggaattcgcggaagttgttcgctctgatattgagatagcgtaggtgtgagcactctgcaaagcgataggggatatggaaaagttgattgttcgacagagatagccttcatagtaatcagtatatagtccagaacagtgataccgtatcctaggaacaggcaaaacaagacttgactataaaagttcaaagcaaggctccaacataccgttcgacctcatctttgatcaagtcaacaactggttcagggatcctagcgatgtgtgaatgaccaaggtcaatggtcagcttaggcttgaccacatctgtgacggcctcgctgcctgccagggaacgcttagtatcttgaataccactttcaacagcacgtcgtgctagatcaatggtttcctccgggctaagtgtttttgacccagtcggttgtttgctagtactctccgaggcatctcctaaagcagttccctcgtcaggatacggagagtcatcgcgtgatgacgccagaaagccagactccggtgttccattttccatttcatcttcgtctgtctcgccgcggttcaagcgctgcccacgtattgcgtcctcgggacgagtcatggtgggtgtcatggccgataaaagcccgaatgttgtcaaaaggcacacctcaagccagcaatttcgttgatgaattgataacctgccaagaactagaagaatatccaggtccagcgaccattcctatacagacacacttcgggcacctgcgcaaagcatcgttggttgtgattaagccggaggggcgggctatctcgacgttggacggggaacgtagctcgaggcggccgttagagtggattcggagcggaggaagagagatccgaatggtcaagtgcccaatgggctgggtaccaagtgttcgaacgcagggcagagttgttcaagaccggcgtaaacggtgcaatgaagccctttgacaatcgcgggcgcgataaagagattggccacgatggagatctggcaggtccaagaatgttgttatcgaagcaacaaacgtctcgagaaggctgacacggatagttaaaataaaatcgagtcttggtcctggaatgaaggaaattggggatattcaagttgggcgaggcaggaaatcttctgattgggcaaacaccggacctccgcaactctgcatccagactccgcctgcgtcactatattgaaattgaaatatcaaggatcatatttagggagagtttaggatctacgatgcatgttactagaacgagaagtgaattgaccaagaatgcatgtgctatcgtgtaaatagagctagggaagtacaacatccagagaatagatcaaataatatacataggccatcaataggaaagactagggatccaaaagcccctggaaaaggaggcatagcataatggcgttcgagcccacaccaacatctcagactcttacagagtgaccgtctctccttcttcgacctcggtctcacttgactcaacagtctctcccagatcaggcgcaccgctaagagctgatttccgctggtcctggaccagagatgtttcccgagcccaggcaacccatttgtcgtactgctcactctccatcttcataccaatttccatgtatgacggtccgaactctgcgccatatgctgcggcctcttccgcagccacccgtcgttgaatatcctcctgcaaccgaagtttgtagaattctcgacgagcaatatcgtaagcagtgctcttgttcatatccgggacgttattcaaaagccacagctgtcgctgaacaacactaataccagagaagtaatacattagcattggggggaagtttcacgtaagaaaaatcaagcattataagctaaaatattgggaacacacctttcaccatctaaccgctttcctggctgttggatgcggctccaatcatagtgttcaaagtccttgccagtgctctcaagaagcacacggggccgggcaagttcccagggatgatcgcggaagaattcagttcgcaaatggtcttcctcatatttgagctcgactggctggaaaagtcgactaggctttttgggctttctgcgcttctcttggacttggaagacgacctgcggcttcgacgacccagggaccgttttcaaccgctgctgaacaagctcatgctgaggaggacgtgtacgaatgagggtttcagcaggagggatctcgccgatcacattgacccattgtggcagtttgctggtctttccactggcgaattggttgagtgctgtctgccgcacccggagggctgtgaggtttattttgcccatggcagtcgggcaccgtcggtagctggaagagcttgaaatagaagaagaattgatagcgactggagacagcaaatcaagagacaagatatgcgctgcaggggacgaggtggttgatgcgggtgcgaaaagatgggattggcaaagcgcgtctccgattggtcgagggatgttctccgccagccagaaagtgcaggccgttcatcttcagaaaaacacacctacgtcttccgaatcttgaccctctccccctttgtctgcttttgcgcccagaaagtagacggctctctcttgtcgagtggcaaagggctctctcttggatgcggcgtacctaatgccacgatgtctgtcatctcatgcctcatccacataggtcccccagctcgccaagcctgcgaattcaccccaagcaggccttggatgagcttcctctctttcgacaaacctcaatgcctccctcgaacattcattctcatgcctcctcggtgcggagactctgtccccgtcgtcctcgcccgtccgtcgcgtcaatagcagatatttttgtcggctcgctgattctggcaagcttctgccacgaacactcgccgaatcgtcgggggttgtccacagtagcctggagggcctcagatcataattttcaaaaatttcagagcaaaggcgccactggtcgcagacagctaccaccccgacgacaaccagagtattcaagctcaaggtttcatctgtcgcaacccaaaagaatgatcagcaacggattggcacgtacgaatgacgataatacagaggagtataatattgagaacgaggaggcagagacagacaacgactatataccattgtggccagcaaagaatgcggacgcggaatcgcaaactcgttgtgaaagatttgattttacatatgatttcgaccgcagaatagagataacagaacaaacaaaaaccgacatcgaccccaaattgccggaaaaatacccccgccaatctttcccgtcatggctgcatcccgagaaggagaaacacctctctacctcggaactgtacgaaaggtccttggcagatcatgactgggaggaagcagtgaatgctgtagcgccatattcacgttacaaaaagacgcacagagatgagtcgcgcgatcaaatggaaatccactcggttgagaagcttgtcagaacgttatgggaagagccaaacccatccacccaatacctgtttcggttatacagagatcttcctgcgccgggcgtagctttactctcgaaacgcacccgcggtgctcttttgcgtttgttcgcacatccgcgagatcgacggtgggtagatgctcgtcgctacttggcattggtggacgacatggtaacagcccgacttcctctatcccgctcactctggtcttctgcgatacatctttctgggcgagccaacggcagagtcctgaaacgagatctcattcgagccgtgggcatgtggcagaagatggaacatgtcgctggagtaaaggctgacgaagtggtcttcaacatcctgttcgacattgcgatcaaagccggtgcattcaaagttgctgatcgcctagaggaggaaatgactgaacggggcctgagcttttcacggtgtggaaagacatccaaaatttattattttgggatgattcgggatgttgaaggtattcgagagacttttgacgactttgtgaaatcgggtgagatcgtcgatacagttgttatgaactgtctcattgcctcttttcttcgagctggcgagacccaaactgcggagcagctttacgcgcgcatgctggagaaacaatcaagcaataataagcgcgtttcgcattctcaaccggacgatggaatccactttcacattggcgggtctaatctgagctatgacatgccccaatatcgggaacgagcccgaaatttgggccgcatattgaagaagtcgtcagcactcaaagagaaatttccggaataccaccgtgctctccaagattctctctccattgcccccgacacgcgaactttttatatcttcctacgacactacgcctacaacactggccagcttgatagcttcatggctgtcatgcatgacatggaaaggacctttgctgtcccaccacgtgctataatctatttgttcctctttgaaggtttcgctattcatggtcggaggaagaagcagtggagtgcggaaaaccttcggctgacatggcatgcatatatccgggctctgcgcgactcgaatgcaagactccgtggactgaatttgaacaaccgaaagatgacgtgggagaacccactggctaagagcgtgacagtcgatgtcgaggagctaccagtgactgatgctcccaacgggttgtacatggcgttgccaacagcgaatgcagttgggaattcacagggatccgaggaaactgccgaaaactctactatggatgactctcaagacaatgaacaagactctaagcctgagctggatgaaaaggacgatgaatccacagaaatagaggaacttgatgtagatgaggtcttcaaccctcgcttgcagttctccggcgaggcagagcaagaggaattctgggaccccgagcagcgtctcgagaatggtctttttattggacgtcggatgatcatcactatcctgcaagcattcggaacatgttgtggccccaaagaggttcttgaggtgtggttgcaacttgagcggctttggcatccacagcagcgcaaatcgattgatgtttttgccgtcaaggaagagcttgataaacagatgtccagggatccacatcgggatcgctgaacaagaaagagaggcagctgaaatgtggatattcagcacttgtacattattttccatatagatctgccatataccgtcccgatttctagcgtgtcttttcgcaaatttattgtttgacatgaagaccatgtccatcttgtagaatttacctacctagtttcctacactgtcatcaagtcttggggcaaaaagcctcggggccaaatcgaatccaattgaagtccaatcccaaaagggaatcaaaaagtcaccacgtgacaccgcgttctaggacgcggctaaagactcaatcttcttcttctactgcacttactaccccttttaactaatctatctctgctatgaagcacaatggatcgtaatccggggcttacgcgccaaatttctaatatgcgatgggtcttgaaacataccttcaaaaagaatgatttccggtaagttgatgaactagggcagaggggtcaatttacttattctaccgcatagtccacttcaacgagaggtggtctcctccgtcatcgaaggacatgatgtcttccttcaagcatgcacttcgtttggaaaaagcatgtgttatcagctgcctgcagtgctcaaagattggggttgtgggttttcagcatatcttattttcaataacgaattagcctgacctcgatatctctagtgactgtcgtcgtttgtccacttctttcactaatggtgagtgtggttttggaacgtttgcaatcaaacagctaattcccacagacagatcaggtgaatacattaaaagctcttgatgtaccagtcgctacgatcaattccaatactactcatgaggagagacaacgagtttatgaggacatgctttgcggccacccgagtacacgcctgctttatgtcacgccggagttgtgccagacagacaacttccgccgccgccttcttatagttcacaagcaaggtcagctcatccgcgttgccattgatgaggcccattgcataagtgaatggggccatgacttccggccagcttacaaagagctgggctggttcagaaggaatcttgtcaatccgactgtcccaataactgcattgacagcgacagcaactccccgagttcgctcggacatgatcaacattctaggattggatcttgaaaccctccggctgttcaatactccgtcggaccgtccaaacattcactacgaggtacgatatctcgctgacttcgctggtgacaacgatagcgcagaagacagccagatacaaaacctgctcggatggcttaagggcatccaaacccgacgagaggcccgacttggcagcgaagcaacacggctccccccaatgtcaggaatcgtatatgtagggacccgagctatggctgaacatcttgccaaccggttatcctattcctcggactatatggtcacggcagtggcataccacgccggcgtggaagccagaaagcgcgcgcacattcaatcaacgtggaagtcttctcagccgttccaaccagctggagggggaaggacgccggtcttctctattattgtggcaaccaatgctttcggtatgggaatcgataatccagatgtccgctttgtcgtgcattggacaccaccgcgaagctttgaaagctttgttcaagagtcaggacgtgcaggtcgagacggccgagccgccgcctcactcgtctactacggaattcaagagaggaacttcatagagaacatgatctaccgtgatagtgaatctcaccgtgcgcaggcccctgaaaatcgagatgccaagcttgaaagcttcggcaaggtcattcggtactgtgagagtattaggaggtgtagacatgaactgatcaaagagttctttggtgactttgaattagaagaaatgggatcacaactgccggccagggagggtgtgcctgttacgagctcatccccttgcgacttcgcctgcgatttttgcaaagagggtcgtgccgggttggcaaagcgccgggaaaaaatggcatctgagactcagatggctctcctatacgcggatttcgactgaggaaatcatcgtctatttgattgtgctgcgtggtttagggttttatctttttttttttcttgtcgtctggttctgcttgcatttctgaggcgccaacagcatgaagggtgcagggagggagttcttttatacttcccatatagcacagagacaaagacatggatggaatccagcatccgagctgctcggcaattagtgttcgcttctaaagagtttagccacagcaataaatccactgtcaataagcaagccttttattatgaacacaattatggagtttaccgagtttaccgagtatggaaataggtaaatcaaagggttagacacaaggcaactgctagactttctttagcaaagacaaagagatgagaaagagatcggtgaaaatagatcgctagatcaccctcgtttttgcaaacgaccaggacaggcttttgtgtgccatatgcgagatagattgcgcatggacagcggaaggcacaacgggcacaatactaacccactagaacaggttctagcttaaagaccggggggcgggggaacctgtaattcatgtatcagcattcagaactagcatagttgacattcgagcaacgtaccgcgctgtagctgccacctgcaccaggcggaggcggcggggatcccgagccaggaggtggggcaggggtctcgctggccggagcagtaggcggagcactgccatctgcctgctgctgctgttgggcggcggccatctgctgatagtactggcagtaagcgacgtagttctggtatccaccgtagggagcatatgggtcagtggtgccgtagtactgggcgtactgagcactgtagtcagcggcagtgggggtggcagcagcgctcggggaagcagcagcagcagcctggcctgcagggctagcagagggattattatgctgctggcgattgttgtagccaccgccgtagccaccaccaccaccaccttggtagcgatcaccacgatcaccacgatcaccaccgcggtatccaccgtagttgtgctggggtgggttctccttgaaacgttggtactgttcctttacattggttaggagatcctcgcacagctcctttgcctgctggacatcgttggcatcaggaccacttgaaagactgttagtaggagctcataatataagtgagcgaggcagaaacaagcgggaaataaagtcagtaagagaataatgacaactcacgccacatggaggaacatcggttcgtcgctttcacggccagtgctggattcgatgaagccagagccacgacccttgatctggacacggcaacgagtctgctgttggatgtgcttcacataagcaccgccctgtccaacgacctgagcgcgcaagttgaaaccgggaattggctcaagatcgatgagaatgcgctcatccggccatttgcgctgcgtcaaattagccaaatcattatattaacgaagtcgaaaggaacagtcccatacacggccatactcatcccgctcaacctgctgctcgggctcccggcggcggaaacgtcgctcgtcaaccaggttcggaagttccttttgcatcaggtcattaatcatagtgactgctttctccagaccttccttgttggtgctggtcacatgtaggtaaaggggagggctctagaacggagtaatcagcacttgatctcgcgaatcttaggaagacattccttactgctgcagtcgccatgttcttgtcagggtaatagtttcctcgggttgtcacatcttgagggagagaaaaagtgagtgagaccttctttgcctaaagttcaaaatataaaggaagtcgtaccggcgccggtttcatcttgaatctataagtcacgcagcggaggttagcagatgcaatagagggtgaattggaagctatgaagggtaagcttcatccagtccgaaagaagaaagcagaacgatgagaaagcaatgttcggagtaccccaatcttctaggcggaacatgactggaatatcagcaagtgacaaaggggataattaccatcttctgagtagaccccttcgtcagggtgtagcgattgcgcaggtcattgatctcaatgtccttgatgtagtctccatctgcgacatagatttcggcattcaacttcgctgcgccttcggcggagggtgactgggaattctctgtcgcgttgtcggcctgttcgacgatgttaggaggtgggtagaacgaatcgaagtgggtgtatattcacagaacgaattggagggacatcaacgtgttgaatggcctttttcgcctgaagctgcgcattaatcttggctgctgctgccgctatagagaccacaataattagccaaatgatctcatttataacaatatatgaacctagatgtaacgaacctgcggctgcagccggatccacgacaggtggctttgctggagtatctgcgccagggctgcgactcagagtccgactcagcgggcgactcagcgggctacgagtgcgggccgactccgactgtctgttggacggagatcgagagcgttgatcaaaacgggatcgccggggctcaggctcggtttgatcgaagcgagaacgcttgactcgatgttcatcgtccgccatgacgaaagttggggtaaggtgaaaaggaagaggaagtcgggggaaagaagctcaaaggtgcgcgaaggagtttgggaggcgaaagccaagccaccaacaaacaaggccaccaagacaaaattaaggaagttttgagtagctgataagctcagaatactcagaagagctaataatattatatattcttcatttccaaggactgttggtgttttctagcgaggcatgttgaagattgaaggtcacgtggtgggaatcacgtggttttaatcacgtggttttataaccggcagatgtactacaccgctttaagtctagcttactatgagtcagcgggcggtcgccgagatcggccgattcaaaagaatataccccgggcggatctggagtgaatcatcgcacaactcattcacattacttgaactcctcatggctttcaggcgtcctttgacgctgtccctagggtcagcgtcgctgcagtcatctgctacagctgctgcccgatcccgcgttgctgcgcttcctcgattcacctctattcgtgcgtcgtcaagctcaacttcagctcttgcctacaaggcattgcaccgtcggtcacctctgcctttgccggtctccgatgcctcccctcaatgggatgctccgaccgctgtctcctctattctctatgagactcccatgccgccctcaaacccacctaagcggcacatcctgaactgccttgtgcagaatgagcccggtgtgctgtcccgtgtgtctggtatcttggccgcccgcggcttcaacatcgatagtctagttgtgtgcaacaccgaggttgaggatctctcgcgcatgactatcgtgttgcagggccaggatggtgtcgtcgagcaggctcgccgccagcttgatgacctcgtccccgtctgggctgtgttagactacaccgactccgctcttgtgcagcgtgagcttctcctggctaaggtctctatccttggccccgagttcttcgaggagctgctccagcaccaccgcgagatgaccacctcgccagactctccggaccacaagcacgccagccttgaccacaccgcccagcaataccacccccgtcaccttcccccgagtcaggctctgcgtcacaagcatgagcacttggatgccattacccgcctgactcaccagttcggtggtaagatcctggatattagcaccaacaactgcattgtcgaggtgtaagtatattctctatcctgactcaggctttttgataaaaactgactcattcgacctcctacagctctgccaagccttcccgtatcgactctttccttaagctgatcggccccttcggtattctcgagtccacccggaccggtctaatggcccttccccgctctcctttgggtgagcccagcgaggagatcgagaaggaagctgccgacgttgtcgatgccagcaccctgccccctggctaagctatatcaaatttccacctcaaaacatcacatacccgaattggattggattggtctcttggctttgtgtatcttctatttttctggagttgacctaatttcaaaataaatggctcatccattgtatgtaaaatgacaacaaatattgtttctttcgcattttaatattccttgcttttttcctcaactgcaacttgctacttcgacttattcatcaacatcgtattcccatcttgccatcctagaccggagattacaggtgctcccaatagcctttcgggttatcattaagaaatcatttgtagcaatgtaggttaatggcgtttaatcgggggttctatattggttatagtttctacctgcagtctatagtgataccatgtagcacaagcaaatatatataaacgataaacgatacacgaatccatgtgaaagaagtttcatctaactgcttacaactgatcagatttaggattgtcaggaagccttctagcgtgcatgtttacaatataatgtctgttctgcagttcataatgtcacccatgtactacataggcagataatatataaagcctactatatgctacttgtggcaacgacccaaaacatatggtattacacggttggagaataatatgaaaaaagaaaatgtgaaaggagagaggagggtatcccaaataagaagcaggaggaagtgaagaatagcccatgtcttaggacatatctcaagaaaggatgagacggcgctggaacgagcgcgcaagctcagatagatcagatcttacactgatcgcggcaatttacctgaaatttctttttttcactttttttgcctttcttcactgggtgtccagataggacttgcgaggtattacccgctcagccaagtcctacctggacaagaatataggccttggtcttttacttattggaaccataggagtccttggggcttgtatatgcttctatttctacttttattcttggttttacttggtttgcaccttttgatgtaggctgagacaaaaaaacgccgggcattaattcaatcgagcaaattccctatgcatcaatcatccaaatattataggcacatgggcattgccgatccagcagcaataatcacaaaacaagaccaagcaagaccttcattatacaggtcgcggcagctttacatcatcaacacaacactctcgcggcctagaacctcactctagccgaaattccttttccatgatagaaaatgatatccatgtagttgccaatcagcactccgaccttagcgacagcatccatctccaacgactgaccaagggccttgcgcagggcgtcataaccaaccccacccatatcaagatcaactggcaagcgtgggctcttggagataccaggaggcaccgcaaagggatcacggttattaatccggccgattggctcattttcctcatagaaagccgttgcgtcgattgaggtgattagaacattgctctccgttagaggtgaggaaagggtgaattctgccgtggaggaccagagatagaactatatttatgagtaaataagtgttagtagcaagtttctcctctctggatagggacatggtatgagtagaaggggcatgtaccgttgcatcttggataaaatgaggcttgttgtcatcatcatcgctgcctggggaacccggaatagatatgcgagggataggaacagtgatgttgaggactgataatgcttcgcccaggtttggtagagatggaatcgtgtttcgatagctcttgatggtgattgttgtattcaagcctgagtgaaaaaaaccatcagcataatttaccattttcatacctagaaggacctgacctgatacataggatgaaagcagcgcccgccctgcctcaacgccatctgctccagcttcgtccaacggacaccaaaagaagtcgacgggcacataactgttgttaccaggcccaacagagatattatgagcggtgaggtgggctacaacagtgtcattgtagagtacaagaaggtcaacgaaggggactgtagccgagtaattcgttggattagtaaagttcgcctgcgcagacaccaacatcgaaaattcagtcgtgtctcctagttgtaatgagacgatgcgtggattgaggtggtcaagtgagttgccgatggaagctatgacatggtcaatggccaaaatattcttgatttgtactaagatcttctaattcatgagaacatactcttcacgggtacctccccttccgcaggaatccctcgcaaggcgaagcggcccaaaccagttgagacctttgtgtctacgctggcagcaacccggagcacgactgtttcgctaccgaacagcattgcttggatgacttctgccaaaagttcatcatctgtgacttctaatggtgcatccttgattgcaaactccacaaggagtgcagaggagccatcttgatcattcaccaatgtggagttggcgtcttgccagtggctgatattcaacacaccgaacttctcttccttgtagtagacatctgcaagggcacgaacttgcgggacttcgatttggaaattcatctcctctggcagagcaataagaaccttcactagagcagacactgtgggttgtgagtctggagaatctggctctgcgaaagggttaggaagggagaaatgtgtatcggacatcgtgaagttcttcacgaggttgtccagcgcatgtcccgtaaatggaagaggcatagtcacgctgcgcagtagattgacaatccaagccggggtactgagtgatggtgcatcagacccacggatgtagatagttgtttcgagaccttgcataaagctcgaaactaaaagatccagaggagaaccctcccgtcctgggcaggtagaggtcaattcatcgggtaatcgttggatgaaaccatcaacgccgactgcggtcatctggccaggctgaacgtctatcgtacttgtcttcgcctcggcaaccagaatataaggatccccgggtgaacagttcggcacaagaatatcaaatccgagggcaggaacagtgagagcgacaggagaatcaatcgaagatgaaagtaagacatccactgccatgccaccactgcttgcatcacgcgcattcagcttgagaatattgatccttggcagaacagggaaatcatgttctgggaagggtcagcttatattgtccagtagtaaaaagaaaaacaaatacactataccttcaatgatgatattgtgtgttaggacttgagttcccaaagcgaacaagcctgacttgagatgcattgtcgccttgcccttaacactaaggcggcccaatcttccctcaatccaatcaagagctatcgcgtggattcctcgaatgtcacccgcctctagatcggtgaggaagtcaacattggtatgacggccgttgcggatgtccactttgatggagggcaatgctgcgtttccaacaagcacattcccatattctgggagataaacttcgacatttgatggacccgtctcaacttccctggctatccatgtcgccagtcgaccaatgcctcgaaccgacttattcttcacgcggcccgagtccatcataaagtcgccctgaatccgggctcgaacgccgtcagatgttgtagaatcgattgatactgcggtcggtttgaagacagcggcttcttgcgcatattctttgacggctgcgggagcagcaaaggcaaataccagtatcgtcaaaacactgattgttagaatagagagagagatgaccgtcggccatggtacacggccccgcttcttgacggcgccaccctcgggcgggttctgtgatgcgaatgacggggatcgcagcgatccttgttcggtcccgtataccaattcatcagcatcacggcggtgcaatagaggtgttgattctgatgataattcatatgatggcctaggctcgtcgacggatgttcgctccgaaggccgtgtaatagggctggactgctcctccaacagacgtgggttcgaatctgccatggtggcctcgtctgaatgagatggtgatatttgcgaaatatgggatgactctgttgataattgatatgatggcctgggctgatcgtcggagcccaactgcttagctggcagaggccggtttgcctcgtcagccatcgtggccctaaacgtatagataaatcacaatgaattgtagtatccggagccaatatcagctatatgaaatggatgaatccagaaccacgtaacagaaagaagagagaggcaagatataaccttggaagaggccctcgatgacgataagccgatgataacggaaccttgggatgcccaggtgtggagagctgacaccttgacacctgacatatcgggccgcaaggcatcaatcccctcgcacatccactctctattaatttattgagtcatggttcttcacttttagggctcccccgttcctattcccttcccacgttccaactcctcatcaataacgcccagctcatcatggctagtggtctcacagctgccgcccgttatggtgcccaaagtgtaaaccaattggccggctccacctcatctttgcgtcgaacactccaggctaatggaatccgacgatttgcccaccagacaccgactttacctcccacctctcctttcgcccctcgtcatcttctctccattgcagacctgacccctacggaattcgcgaccctggtccgcaatgctgcgtcgcacaagcgtgctatcaagtccggggccattcccgaaagcctattgggatctctctccggcaagaccgtggccatgatgttcaacaagcgcagtactcgcactcgtgtatccaccgaagccgccgccgtccagatgggtggccaccccatgttcctcggaaaggatgacatccagcttggtgtcaacgagtcgctatacgatacctccgttgtgatttcctccatggtctcgtgcattgtcgcacgtgtcgccaagcacgaggacgtcgcaggtctggcacaacactccaccgtacctgtgattaatgcactttgcgactccttccaccctctccagatcatcgccgacttcttgaccatccacgagaacttcccggcccacgcgcacaagctctccggcctgggcctggagggtcttaagatcgcttgggttggtgatgcgaacaacgttctgttcgatctggccattggtgctactaagatgggtgtggacgtggctgttgctactcctaagggctacgagatccctgcgcatatgattgacatcatccagcgcgctggtgagggagttgacaaggctggcaagctcactcagaccaatgtccccgaggaagccgtcaagaacgccgacatcctggttacggatacctgggtctccatgggccaggaggaggagtctaagaagcgcatgagggcctttgagggcttccagatcactgctgatttggctaagcgcggtggcgctaaggagggctggaagttcatgcactgcctaccccgtcaccccgaggaagtggatgatgaggtcttctacggcccgcgctctctggtcttccctgaagccgaaaatcggctgtgggcggctattgccgccttggaaggctttgttgtaaacaagggaaaaattgtggagtaaaagccggttaattatggagtccattcaaacatgccgagaagctttacccggccaatgacagacatgatgatttgatatagcggagttgccgatgccgagggttctctgttgccgccgagccaatcaaaagatgatccgacggcctggggatttcggatatggctcctccaaaatagcgggggcttccgattctgagacctgactctattctgttcttcgcagatcatccggaattgactattgtataatatcctacggagtactttgctactagttgccagcgatctgaaatttacagggctatatcaagacattccacctcgggggttgattcatagtactgaatccggcatcactgtaagtgatataaagcagaataccaacggttgaaagcccccaaagctgtatatttccaaaccgattcttgagatttggtaaatacccctggagggtatggactccacatggaactcgggagacctgaagtggaatctcggaatcgttgctcaccccacatttactccacgctccgaagagcatctccaagacgtttgatcgggtaatgcttcgcaggggaagacacattaagcttgcttaagaacctgagtatcgcttatcattcattcctcgaataatacctctgttttcagtacccccaaatttcttccacatctcattatcaacatctcccccacatcacaatgggcttcgaagacaagcgagtcgcaatcgtcggcggcggcctagggggcatgtcctttctcaatgccgcactgtacagcggtctgaagaacgtgcagctatacgagcaagctgcacagttcggtgaggtcggtgccggcgtaaatattacctcgaacgcaaaccgcgttctggatgccttcggtctgcaagagagtatgatgcggaagtcctcccgcaagctgcctagctacatggaataccacaactacaagactggggagtacataggtcacattgctgaattctcgcagccccacgcgcgcctgctacaccgcgcccacctactggactcgctgaaggagcgcgtgcccgagtccagcctgaatctgggtaagcacctggtatccgtcgaccgcaacactgccgccggtgctgcaccgtatacccttcgtttccaggatgacagcaccgccgaggctgatattgtcatcggctgtgatggtatcaagtctaatgtgcgccgggatatgggcctaggagacgaccccaactactctggccaggtggtctatcgtggattcgtcgactacaaggacctacccactgagacggcacagctactgcgcaagactattaacttccgtggacccaagcgccatgtcctgatcttgcctattggtaaccaggagacggggaccgaccgtgctgccatcatcgggtttatgtccgagccgcttgatgcatgggattctgagagctggatgtcccgctcggatattgatagtctccaggagcatgtccgtgactggtgcccagaggtgcagcacatcatcgctggtctgcgcaagagctccgaggacggcaagatgctcaaacaggcgctgtacgtgcgtgacccgatcgaaaaatggtatgagatgaagagtgggcagaaagatgctggtattatcctgcttggtgactcggcgcactcgacccttcctcatcaaggtacgttgcatcctatctgtgtctagtcttattgcggggcatgtattaatagtactcgataggtcaaggaacatgcatggcaatcgaatccggcattgcccttgcaacaattctcagacactggaagacagacgacctagagactgcattcaagttctaccaggacctgcgcaagccccggacagaccgggtcacaaagacaagctacgaagccggcaagttggctagctcagactcccccgaccagatgtccaacaacttcaacccggatgcattgacggagcgcatgaagtggattatggagtacaatgttctagaagacttgaagatcaagggtcagggatatttggacttgcaggattcgcgcctgtaggcggtactgatatatgtcgacatactcctgtgtatgctttttttattttgtagaaacaaataaacctctctgaattttcctacttctgttcgactgcaccaaatgagcattcatcatgccacagttgttaatcgtatgatttgactacacaactcgcaatgttggacgatttctatagatccgtcatacatcggtcattccatctcactcggcttatttacattcaacaccattccaataatatatctcaagatcctatctcttgataacatttctatcctcgggcataataacttcaagacaattgccggggccgaccatcttcacatgtcagccgcacgtgcagcaactccgcatctccatcgtctcgacctcttcacatctgattctgattgtgcttgagctttcgactggaaaacccatgatggaggtaaatactatattctgacctgcacaaaatttgaagtggatatctaacggggcatatatagttcaccactaactcgggaggcttccagtcccgtcgatcatacccatccctccgccatatctctatagcacccttaaccccacgattccctattgatgacgacacagacctaacagactacttcaaccactccgaccatgaaactccagccagcggcagccgcacacccccagcatcatcctatatatctagcgtctcagtcccaagcacgccaccgatcctctcccactcacgcagcaactcgcgaaaccgtcacacgcgcagcaaaagctccacagggagagtagccttaagcgacacgaacctacacagtcgggacctaggctacgccctccaccacattccaaacacgcacaaaaaacagcccagcatctcatactcgcaaggacgacgtcccctcccagacaacacgccgaaccccaaatccgacgcagaatggatactgcgcgccggcattgccctggcctcctcgacccgcgaggaaaaaggccaaagctggctctccaagcgcgagtcctctacaagcctcgtcccagacacggccttggacgaaatactcactaaacgccaccaccaccgcaccaaatcaggcgcctcgtcacacatttcacgctccggcgcctcaaccccaggcggagccggtgctttctcccggcgtacctcccgctcccgcgccggcagcagacccggcagcaacagagtccatctaaccatgaccaccatcccggctacctccccgaccacagcagagaaggaagtgtccttcagctcgggcacgaataccggcacggcgagccccgaagcgcgcggccgtatgcctgccctagttcctgacttcgtggacgcgcgaatccgtgcggagatggcatcgctacggcactgcgagcggtcatacccggacgaagactctgtgtactgggatggggcgggctccgaattcgactcggctttgtcagagtactcgttcgactccgacgagatgccggatgacttcgatgaggcggatctgcagcggctgacgcgcgagcgcgggttcgggctcggcacttggattgaccggttggtcgagtggacgcttttcggggttgatgagtggcctgcggctggtccggctgtggaggctgcttcgcgcattggttcggcggatactactactactgttacattcgaggagcctgttttgatggctgggcgggatgatgatacgatttcgctttgttcggttcgggatgcggatttatcggatgatggggagggttctattggcagtgctgcttctattgagaagcctgggagtcagggggggtgggaggatgctgcgtggttgattcgtttgatgaagagggctttggtataaaatgtgaattgcattgagcgatgttcttgattgggatggttgtctatccataatgtttcgttttgtttagcttgctctttgtaattggttattagctttgttgttcagaatatctatgaagctggctacacatgaccaagcaaaagccctaagatactagagaaatgtcccggttttacatctttctactgatgaacaaaggctccgagaaaattgataggattccaatgaacaagctagcgtgaataaaggccactaaccaacaacatatttagaatcctgcgcgaacaacaggaccagaatgtaagttgcagaatgagttggatggcgagtggcccttttctaatgtatagaataggttcaaatctccgccgacttttccaaagcttaaaagcgcaagaattggagttaatggcccaagacagaagttgccgctctgacacgcatcattggaatatgcgatggacataatggcacaagcaatagagattgagtcaaagccccaaaagtgaaacagacaaagacaacccacaacagcgaaggagaagcaaaagacaaacaatgagacatgaatgaaatgaaaaaaagagaaatgtatgcgacaccagggcgccagtacagatagaaagagagtaacagagttggaatgagtacacaggtggaataattcgagaatccgacagaaaggaaagggggaaggaagggtcttgcgtatacataggaatacgacaagttggcaaagtaagcaagaaagaaatataccgaggcccagttcgttcattaaaagatttgagaacaaacaagctaccacagcattcatcttccaaagtcccagccgaaaaagaagaacaaagaaaatgctgttaggttatccgccttgagtactataacgccatcggaccaggagtctagggtcatgcagcaggtatcgtgatcgtgacatacgtcgaaaattgcgcggtcaaaggggtatggaccgtcggtcaagctcaaatgagagccggcatgaatggggggacgtgaggccgacacgtaagagcggtgtaaatgtaatggtggtctttcgtaaggaaatcggagtggtgtgattcatcaccaaggtccgaccttgactggtgttcccagcccgtaagtaccggaaaagagctgatcccgtatagagcccatatcgccgttggttccgtgggatggtgtgtcaggtccattcatccatcccaagctgagaccgagttcgttgacagctccctgtagctttcctccagaggtttggttgtgcttggccaacttttgatcccaacctccatattgcaattggatgccaccacctctttttgccgcttcccggatgaccaaaatccatgccttgcacatctcgtcataagctgagtctcgttcaatgttgttctgtggcgtgctccagcgaggcaaggcatgaatgatgtcagttgccccatctaggtagctcagggatgtggatgcttgtgattcgtttgggggaaggaagttaggtgtgaagtcactcaaggcgtcaagaaggttggtgagcggctgtcggactcgattgtatgcgtagtccgattcggtgttgccacccaacgggaatgacgactggagggcggcctgatagttccgaaggacttggagagttgaggatacattcggacgtggggatgtgtgcacaacctcatcgacgagttgagggtgacgctcgcacatggtccgtacaacagtccgcaaggcatctgtatcgagggtctctagcagacggggcagagatagaggtcggcctgaaacgttcggtcgggaacgtttgatgttacggtagctgtgaggtagttgtcgaggagtggcggcgggagagtttgtaggcgaagcagacatgcgtccatcatgatcattgtcgtcgtcggctttccgtttacgactggcatacgacgaagagggtgtagacactggccgttctgtcagtacacgaatgcatcaaagaagaaccacctctaaaccggacagagaaaacaaatcattccaaggggaagggatatcttactcatacgggaaggagagaatcgggagttctcgtagaagtgaggaggaacaggaggtgtggccaccaagctgttcatggtgacagccagatggcaaagaataaatgagacggtccaaaggactcggatatccaaaggagtgaaaaagaaacagcaataggcaaccttgaagaagaagaggatatgtaatgggttttgaggtggggagagaagggcagagaaaggtagcggtggagaaaaagtaggccgttgcaggtggcaacgcactccctttgcgcagcttttggagatctgtgcccttgaaagagatttgacgtggactggagaagggcttcgtatatttttgaatgattcttataagaaactaaatgtcttatatcgttctctttgctgtcatcggatgtccactgttttcgggtgctatacgaatacccgcatcatctacatctacgttatacgtaatagaaaaagactaaaaagaaaattgtgggtaatcctattctttggactccagcggtcataaaagggatatcgtttctacaagtacagggactgggcagcaacaatgtcacggcggaccttgcccagggcctcctcgaacttgctctccaggtcctcgctgcccatcaccttggcagcttgcgccatctgccgtaaacactcttccaatcgacggaagacacggatcaagctaccctcataaacatcggtcattttactaggatagttagtatactgctaaaataattgaaagagggggatgcttaccagatatctgcgaaagacttgccctgagtccactcgtagaccacctccatcagctcccagtggaagctctgaacgtactcatcctcgttcacggccatcttagactcctgcgacaccttggcaatgatgcgggcctgtgattggatctccttcagtggcttcgccaactcatcgttgttcatagtaggggcgtccttgaccttttcttcgaacacgaaacaactcatgacggaagcgacttgctcagcagtcaagttgttaaagaaaccattgaacagcaactcgctcagcatcagttcgtcacctgtactaatctcacatgcaacacgagcctttaactgcacgacttcggcttcgttgataaatccaaaacgacggagcacacgcttgcgattcttcagctcatcaagctgcaaaaccgacatggcctctgtaatttccttctttatcgccttcatctttgcagtcagttccacctttgcggcatattgctcgtataattcagtcaaccgaggcgaattgtgcaaaggattactcagaaggcgagactcaagaacctcgattttctgtcatatggttagcaacgtgaatcatgtcttagagcaacaaaatcccctcttacccgcagtagcttcttgaagctttcatccttgatctgcatattctcaatcggatcaagcagcggaataccatctgggaaccgcctcttaacttcatcaatagatttcataacatcattccgagagccaggcgacgtgatatcattgggaagcatgacgcgaatgtgagaaatttccttgatgcagctcagcacaattggcactacctcactgcgagagggttccccttcctttggagggtgaacacccgccggaagatcttggaaagacttggtcccaatggatgacccttccgttattctcaccaagacatcaacgatgtaagattggtgaggactcaatttctcgctgtcattgttcgcttgcttccgcttcttctggttgatcaccacgccccagccgaaatcagcatccttgtactttacatggatcaatcgtccagggtgaatgaaattcaaagaataattggggtgggtaatgacatgctgaacatcgtcggcaaatgcatccagttgtttccgtaggtcgtagtattcgcggatggtcccctcgtctgagatgatcatattggcgcgcttctcctcgagactatgaagctccttctccatacctgaaacacttccagtattctggaactgcttgaagcatcgttcaagcatgtattcgggcgagataccctccacacgcatcaaattgagaatcatgttgtagccaagatggaatgcggaattgagtcgatcctgttcaccacgcacgatctccttggcgactgctgggtccatctcctctccgaccatcatgatcacaatacctcggtcatcgagacctcgacgaccagcccgaccagacatctgaatgaattcagatggggtaacccagcgttggctagttccgtcgaatttgcggacactggtgaagactacagtctttgcaggcatgttgagaccaatggagaaagtctcggttgcaaacaggactttgatgagaccctcctggaacagaatctcaatggtttccttaagaattggcagcaatcctgagtgatggacaccaataccctgttgcaaaagtggaaggatattttggatctgtggcaattgacgatcctctggagacaacatctcgatggcgctttcgaagactttggacaccatatttttttcggaatcatcgttgaaagttagtttgctcatctgtaaagcacctgcttcacactcccgcttgctgaagctgaagacaatgacggggttgtagttcttgagcatgatcatcctgacgatcttgaagatatcagatgggcccttgtttccacccttgttgatttgcttatccttgcccctgcccttgcgtttggctaaagcgtcagccgggtcatctcctttcttgtccgaaatcgcgctcattgctttctggaaattctcctcgcggaaaactcccttttcatccacgatgagatggataccctctccaccagcggggaagaagtaattctggagtggagtcggacgatagttggtgtacacaacgtgacagggctggttatgcatcttcacgatccattcggcaaattgcatggcattcgggatggtggcggacaggaaaacatagcggactttatcgggtaacaaaatgatagtctcttcccaaacaacaccacgattcaggtctcgcatgtagtgaatttcatcaaaaattacccactgaacttcacgcataatctcagaaccacggtacaacatggagcgaagaatctctgtggtcataacaagacatgtggcagtggggttgatggtcacatcaccggtcatcagaccgacatcgccgaactccgcagcgaattcacggtacttctgattgctgagcgccttgatgggactggtgtagataactcgctggttttgtttcaaactttgcgcaatcgcatattctgccaccacggtctttccagcactggtatgagctgataccagcacactctcctcccgctggattgaagaaactgcgacctgctggaaaggatcgagtgtgaagggccatgtctttgcggggttcgccggaggcttatgctgagaaataggcacataagggtagtttggcgggattgcgacttgatggcgcacttgatgagacaccacaagagaagaagtgcctgcagcacctgaaagtcctgcagaggctgtgatttcgcgctcttgctcggtttcgaaagaatcggcgacgattggctcgggttcctgatccaatcgaggtcgcttcgtctcaggttgctctagttcggacggggtcgcagggggctcggcttctgctgagtcaatttccgcagcaggtgcatcggacatcgcaacatcctctttctgttcaggctcggcatctgcagttttcttcacagctccattcacctgtctttttttgttcttatccttcttcaagcgcttgggggcatcctctgacggttttaccgcctgaggttggtcctcaaagacatcaaagagctcatccatctccagcggttgggattggtgaatcaaccacaggaggagaatgagcggcgtaggtaaccggcctggactttttctggttgagaaatttaaaagttccatccatatggggcaagcggtgggggcgatcccgagcaaaagacgctaaacccgattgaatgaagtcaaatcacgtgattagcgatcatcccattccgcacctcgagatgttcccttcggcttcgtccgtacctttccgatcgtctaccctctcctctctgtaactcaaggttagtaccccccaccggaaatacaaccattcctctcgccgacgcttgaatttcagatgtactcctccgctatccgggccagaatggccacctccttcgctgcccgtcgtggcttctccaccactcgcacccagcttgctagcccctaccactacgccgagggtcctcgctccaacatccccttcaacccgctcaccaagtacttcttcttgcgctactggagcttcatgagttagtggtccccaacttacatatgcgcagtgccatgactaactcggacatcatctagttgccggattcggtgctcccttcgccattgccggtgagctataccccctctctacgattctaagccttaagcatactctaacatctctttctactagtctggcaaacctacaagaccaaataaattgccctttgcactgtacttttcttgcgatagcagtctgggcaactaggtggttgaaatcttggatcggggttgaagcagaggcggataccatgtacaaagctagagattattacggaaaattggttccgcctgttaccgaccccattgtaattgtgtagatgtcgaaatgtgtagcttaaaaggacgttgaaatatggatgaagtcattggctgagccgctgtggaaaaccaaaaaaatctcttggtcggcgcgattcatatatcagtactcacgaacacaaccactcgcaaacaacgtgacagttactgtcaacgaagaagaaagctggtctctgaaacttaactttcctcgctattgtttaaattccatacatttactcccttgatcgcttcatggcggggtaaaaaaagaagcataaaaaacttacccgttcctggaagatgcgcaatttaagaagtatccgtctcgctgagacggaaattgagagcgaactgcctctcacagctacagcatgggatactgcttcagactcggtggtgtgcacctttggtccggccgagaacaatgcaatcattgaggttagacgaaaacgccccgagatcacttcaacagatccactgtctcccgaggcttttgagtgtattgcttcctgggatgctccgtgcccgctgccggacctggcatgtgatcgtgtactcgccctgcattactttgcggataacctgacaacctgtctggtgttggaaggaggtgatattatcgttgttcgcgaagagccacttgccggcgaagacaagattgaaatcgtcggctcagtcgatgtgggaatcacggctgcagcatggtcaccagatgaggaaatgctggctctcaccaccagagcccagacgttcttgtatatgaccagagactttgagaatgtggccgatattactttcgcccacagtgacctgcaatcatcacagcatgtgtcagtgggatggggtaaaaaagaaactcagtttcaaggaaagagagccaaagctcttcgagacccgactgtaccggaaaagatcgaccaaggaattttgagtagtcaagatgatggtagcactacaatcagctggcgaggggatggggcgtatgttgctgtgaacagcatcgaagcagatactcgccgtgtgatcagggtgtactcgagagagggcactttggagagtgtgagcgaacctgttgacggtttggaaggcgcattgagctggcggccatctggcagcttgattgctggaattcaacgactcgaaaatcgggtcgatgtggtgttcttcgagaaaaacggactccgccacggcgagttctctcttcgtctgtccgatgaggagatgaaatcatgggcttctcgcatccacctttcttggaatgttgattctactgtacttgctgtcaagttccaggaccgtgtacagttctggacaacgggcaactaccattggtatttgaagcaagagatccctatcactgttgatacaaattcttcgcttccatattctttcgaatggcatcaagagaagacattgcgattggtcgctggctcctcaggtatgctatccttgcatgaagaacagagcaagaataaaagctgatctaaacagtctcgatactggacgcggattatgtgtttgatatcaaccatggatctacctccattccggatgatgttggcgctgttgcagtcatcgacgggagtaagtatccagtcagacctgatttgaaacattactgattcacctattagaaactctcaaattgaccccgttgcgaatggctggagtaccgcctcccatggctcacaacgagctgactttagagtccaaagccattgatgttgcattcagtaaatccggatcccgtattgctgtcctgacgagcaacacactctccgtttatctctggtctctgaagagccgacccgttcctgttcctatcctcgagtcaagctacccgttatcagatgccccagccagtcgaccccggcagattgcattcttgaatgagaatgaggtatatgttctcaaggacaatggaccgaactcaagccatatcgagaggacgatgctagacacccgaaccaccgagtctgtatatcaggctgtagactccgagcaactggcatcgatcttcgccggtattggacaccaagctctgtggttctcacatgcccgccaaccagcccatcctgtcagctattcgagtgttgaagaatcttcatcgggaaatcttgatattgcttcatggggtgagagccccaatgttgacagccattgggcccgtgttgtctctatctctgagcatgaggtaagtctatattcgctttttatttggagctttgtgctgatttcgatagcgcgttttgattgcaatgacgagaactggcaccttgtatgctaacaagcgagtccttgcgaggaactgcacgtccttcctcgtgaccccatctcatcttctattcaccacatcggcacatcttctgaagtttgttcatttgaaccacgttgatggtaagattgatttcttggacgtctaagtcttcataagctaacatagggattgcagaaatggaagttcccgaggatacaccagaaaccgatgaacggtgcagaagtattgaacgtggctctcggttggtttcggtgataccgtcgattttcgcagtcgtacttcaagctcctcgagggaacattgagaccatcttccctcgcgctctagtattggctggaatccgtaccttcattgaccagaagaaataccggtctgccttccttgcatgtcgcagtcaaatggtggatctaaacattctccatgattacgctcctgaacaattcatggaaaacatcactctgtttattgatcaagtcaagaagattgagtttattgatgatttcctatcacgcctgtcgtacgtcaatatccagtcttataagaaactattttactaacgttcacatagggaggacgatgtgtcacagacactgtacaaagacacgctgaaaatatccaagaacgtatcggcagctgtcgcccagccggatggaccagcagttccctcggtgcccaaaaatggcaaaaaggagagcaaaatcaacaaaatatgtggtgcattcctagccgctctccaaaaccgtgtagataccaatttgcagaatctgatcacggcgcatgtttgcaaatcaccgcctgacatggaggcaggactgggacttgctgcaggactaagaagtaagtactcggttctttgtccttctcgataatcaagaactaaccatatcacagtacaacatcccgagcaagctgaagatgctattgcgcacatgtgtttcttaaccgatgctcaccggctttactctcacgcattgggtgtatatgatcttgagcttacattgttggttgctcaacaagctcagatggtaagactttcggatgaagtcattggctgtgttattactcaacactaacgaattctcaggatcctcgcgaatacctaccattccttcgtaagctacagcagctcccagagactcgaaggaaatttgagatcgacaatcacctttctcgcttcgaaaaggctttggtgcatttgtatgctctcaatgctcacgatgagatcagcgcatatgtcgtcaagcatgtgttgtataaggaagcccttgagctctacaagtaccaagcagagcaacaacgggaaatcaccgagctctatgccgattatctacaaagtcaatcgaagtacaaagacgcagcaattggtcagtggtttaatcagcgcgacaaaatgacagctagctaattttcaaccccagcgtacgagtctctcgagctttatgaaagtgcttacaagtgcttcaatctggcgcacaaatggcgcgagtcattgtactgcgccatgatggcatctctatccgaggaagatctagctgctcacatcgacggtctggtcacaaccctagttgacgaaaacaaggactacgtcgcggcagcaacaatctacgccgaccatttgcatgacatcgtgacagccgcacgacttctctgcaggggatcgaagttcgccgacgcagcacgtctccttacactacacggtaaacagagcatggttgtcgaaatcgttgactctggcctcgcggaagcaatgggcaacatgaccgacctgcttgccgactgcagatctcagctcaatgcccaggtcccacgactcaacgaactccgtcagcttcgcgctaccgacccgcttgctttctacggtggtgaccccgccggtggagaggcgggcgtcgatatccctgacaacgtctcgctggccccgacagatgcatctacgcttgccggtcgctccatgttcacgcgttacacgggtaacaccgggaaaacaggcaaaactggaatgacacgtcatacctcgaagacccgccggcgcgaggaacgcaagcgtgctcgtggtaagaagggcaccgtttatgaagaggaatatcttgccaacagtattcgacgactcattgaacgggttaactcgagcgtagcagaagctgagatccttgtcgatgccctgctgcgtcgtggcatgcgtgagcgtgcagctgctgtcgagaaggcattgcaggaagtcttggctatgtgcgcggattgccgggacgaggtatttgaagtccctgcccccaatacagcgaacgaggaccaggaggatgaggataatgatgtcgagcccatcaaccctcctgtttacggaggaggtgccagtgttttgagagaaagtatagccattgttgagggtggcggtgccgctcgcgtcaaggagatccctatcgtcaaagaaatgaagaagtcttctttgctagcttgaagcagttgatgaatatactgcgtgagcctagcatctagattatgaaatgaaaaataaaaatgaaaagttgcttcgattccaataattcgccctacaattatgtatcttgatctacatgttacacttgtatgacttgctagcaactttctacaagatatctcaagagtccctaggctatgtcctgtgagtctacgagacccccataacacaaatagaatacccctccacagcagcctattctcattagaactgggtccgaacattgccttttcacggtgggcgatattgagtcttaatattcactgtgaacattctttcacagcaaattgagcgtggtatacttgaagctatggtcattctagttttgcttttgctttatcaaggtgactgggatattagaagtgaagtatatatctcttggtatgaaaatattttgatctcgagcgtcgaagctatctatacacaggtcatcagcacaaatactcaaaaggttaagtgcaagtctatgttgcacaagtggactatgatcattcacatagtaatatcctgaagcaatcaagccatacactatatcccgttaaggtaaagtagtacaatagacacagctatctcactggatgacacaaaactgacacatatatgttgtgcttctgtgcgttcaaagtatccaggatataaaaaaatgattgtatccctcgtctgaatactaggactgcagccaagaaaggattccaccctaggcaaggcttttcctttccaagaaccgtaagtgaacatttcaaattatctattagctgatattaacctcttaatgtcttgatctagattatgcacctctccatctcagcatatctcactttcctcgtgggcctcagcacgctagcgacggcccaagtggcagccccagcccggtctatcaaatgcgtttgcaacggtatcatcgagaatactcagtctgcctgtgttgagactggtggaagcttcaatgctacagcctgcggctttccgggttgctgtgtttatgccaacgaacaaactacgttcattgagaattgtaggacacttggatatggttttaaacgctgtgatgattgtcgttcttgttgagaatacgggggagatatacgccgggggaaggatagtaagacggacattggacgtataaagttggaagcgaacattccattgatttgcattccagtattgtgtcatgtcgtcatgtgcaatatatattattatggaggaatggaaccagacgtgttgcttcagtataaaccgagaacccactgccatggtattattatgttcgatatcacgagggagaaaataagatatggtgaacggaatatctgcgtcaagcttgcatggccaacttgaagtgcccgcacaagaacctggggtatctttcaagctgacagaccttccactgttagccagaatgagaataccggttgcccggtgtagcttattcaaattttctaaagagtgctgaggatctcgccagtctcgctgacaaggtggtcttcaaccttgacagggccctctccgacgccagtcaagatgacacggctcacaccatccttcagaacttcgacggcgcgagagtcaatctgatccaaggaaacaccagcagtgacattggctaatctctcgtagaatacgccgtcccacccttcagtgttagggcccagaatagccttgacggtgccagccacaacttcagagtccttatcttcatagtagatgacagcatttgggccagcatcgaaagtgtaggcacaaaccgtccggccaacaacacggttgatgtcgtgcacaaggcgaacggcagcacgagatacgtcgttcatgtagaagatagggggccacgagtcgaggcaagtggcgtggaaagtgttcgagtctcgcatggtaatctccgcaaactcgtggaagttgcgggtttgaatagcggtctcaatggcatccatacgcttgggaacaacgttcagtacacgctcagcgaaaagggccgaggtggccacagtggtctgcattccctcggtgctgggcacatccttcttctcggcactgacgaccagaacaagagcccgcatctcaggccagtgggttgccggagcaacttcctcagccaggctgtcgcttccatcggcaagctcacccgtgcgccatgcgacatacccacccatcagagagcggcaagcagacccggagccttggcgcgcaatgcggctcagctcctgaggcgactggggcagttcgtaaaggtcagcgacggcgcggaccaacgctgcgaagccagccgcagagctggccagaccggcagcagtggggaagttgttctcggagacgatccgaagagggtgggcggagagcttggggagcgaggagtcgccatcctcaagggccttgcggagggcacgaaggctggagatacaagcgagtgtccgcttggaagactggatgtcctgcgggctgccgttcaggttcagggtgtccgcaggtgggtattcggcagagcaagaggcagtggtcaaggtacggagagagcgctgagaaagtgtaacagagagggaggagtttgtggggaggttaagaatagtatcacgcttgccccagtatctagaatacttctgttaaaacagaactatttggtataaatgagatgaggggtaatcagcggcatacttgatgacagcaatgtttaccggagcggtagtagtggcccggtaaacagtctggtttgatgtaacagtctggtttgatgtagacgccatttttgctttgaatgaatagaagaacaaatttctaaagaactataggagacacgaggggagatttacttcttagggggattgttgatttggctgggcggtgagggggcaaaataatttctacggcgtagttctagttccgcggatgcgccgttcgtcctccagtcattgacctccaattagtattcaacaatgggagctgcagcaagtacgccctccgcaccttcagtggagccaccagcagcaacttgtcctgtggaccacaagactcgtgagatttggttgcaacaaaatagcaactcacctcatcctacttccggtgtccctgccgaacagggacaaccacgtgccaaagcacaacgacccctatcaacagaccgcgaagtgagcactatccctagagctggtgatttcagctcagcaagtgcttgccccgaggccaacaagggttctccatccccatacgccgcatcgcatggtagcccgtccaatgccgaatccgagactggccgcgatgaagctactggaaattggatctatccgtcggaaaaacagtttttcgaggccttgatgcgcaagggtaacactcctggatccactgcctcggcctcagagctcgcgacttccgtagcctccattatccccattcataatgccgtcaatgaacgcgcgtgggatcaaatcctcgaatgggagaaaaggggcccctcggctgaccctgggagcaagaaatgcggaggcccaaaattatattctttccggggacttggagtcgatccacagtacctgagcccgcgtgcgcgaatcaacggatggcttggctaccagcacccatttgaccgacatgactgggttgtggagcgttgtggtggtgaaaagattgaatatgttatcgatttctaccagggcaagccatcggaaggcaatgcaaccccatcaggtctggctgccaatgccaaacccgggaagctcagtttcttcctcgacgttcggcccaaactgaacacttacgaaggttggaggttgaggttcaaccgcttcacaggtctatgaaggcatcattgatggtcgtcttctggcggaatatgctttcgcactgcacatacaaaggcgacaacggagcacgggcagtatttgggacccaattgggtatattttgcatgtacaacacatatcattctgtacgatatcaggctacaggattaagggacagtgatgaattaatgttctccattccaatacacatcggattggcaaggaatgcgcaaatcagaaataagagaatgaaatgaagcgaaaaggtgagatgattgactaacggaaatgcaatcatgcaagagggatatcgtgcgcatacatgacaacattaaagacgaaaaccgtgatggtagccaataaacaagaacgaggaaaataagagagatctatccgaggacaattgcaagcacaataatagcaaggataacagcaagaatcacaaagagacagcaggctctgttgcgcgcattcttctgatatctgctagcactgcgcaattcgacattggcgcctcgtgtgtcctgggtgacattttggacattctcgctgatgatatccaactgccctccttgttccgtaacgatgtgcgcgacatcacggaagagctcgttcagctctcccacactttgttcaatgttccggatctctgcctcacgctcgatgatcaaggactcttggaagtccacctcgccctgattcgccatacggtgttgctcctccaatagctgctcttgtaattggacatcgttgtcggcagacggttgctcgcctccttcgatagctgtacgggcagcaactgcagaagcgcgctgtttctcgagtgcacgacgctgaatagtttggaactcatccaaggtggccttgaattcggacgatagcttctgctgtgtccatttctgggagggctataagttgggacgttaataagaaattctcgctagtggataaaatcagatggatcatacattgacgtcctcccatgtctggacctgtttaatcccttctcctacatccctaaacccggtgcgggtctcttcaagcagattatgaactcgctcgcgcacacgctctgtatcgcgtttggttccaagaagggcaatttggttggataggcgagagatgttcgatgtcaaggtaaatagctgatctgagagctgctcggccagatggtcgaagtccggatcgtcacggtattgcgggtcttcagccctgcgcatggtggtaggctgagcctccaacgagtttagcctgtcaaaagacattctatatgtagtggaaaagcaattaatgtgtgcttaaagtgaaggtagaagaagactcgataccagatgagttatctgcagttccctgctgcctttgataagccgcgttggtgcgcagaccgccctcacatgacgtactatgcaactactaggctcgatatagactagctcctgggacaatgcactttgcgccacatatcacatgatgagacgtggctggtgtgttttgatgcctcaaaatattcctaggtggacctcgccgttgattctgtccgaccagctcaacacaatcagctgtcagccgtggctattcgtcaacaccgtcactagcccgccaattccgttctccagctcccggagctcgccatatgaccgacattctgatcatgctctaatcttcaacaatctcattctcttccacgagcgcatcccactcccaagctgacatcatggctgttgttcaaactcggccgtacaggcgaattttgacttcggccttgcaccgaagatttgtccatgcatctgcactttcacttctggtctcttatatcatcgcaattgcgatcggagagaaatcgtcctgtgagtacatcgcaaccttattgggtcgagcctcgaaggctcagcttcaagtcctgaaagtacaaagaactgataaaactatcctatgcagttttctggctatggtttccctttggtggttgcggtgttcgaactgtgctacttttcatatcttcgctcaccatttttgttctccgcgtcagtcaaatgcacatcggctcgagaacagctagctcctcgttcggcaccttgacatccttcactctgttacaaatcgcgcaaaccttcggctggtacatcttttcggcatggtggttcactctgatttatgtatggtcgtcttcgagtgattccaacctcgagcttgtgaaacggggcaggtgcgttgaaaatccttcaaatgactgcgatcgggactaatgagatacaggccacacgagcgaccgaccctgaacgaaaggccgatttaccttcattccttccatatgtttctagcatgcgtgcaagcagtgttccacctctactacgactacgaccgcattgcattgcccatcgcggagcaaagctccagaacaaatgacgagcgtacccatccagtaccgccaacctccaagtttctacagggtactctgctgcgagaattggcagccggggctctcagaagcgttactgttgctacagcgtctctcgtggtataccccatatttttcagaagctttgcttggagctggtctttgtactttgccaagctcttttggagcttcccgagatctgcagccgagcctcaaagcttcattccctcgattttcccctacttcttctttggaaccttggtccccggagtgttgcttgtcctctcctggcaaaccgccaacctcttctattctgtgttcatcggcaaggagcctttgaagcggggccagccactcacaacagaagccaaggatcccaatggcagtcttcttagtggcctcaaggcgaagaaggaagttgtcaagactttcgcgctctgggagctcagtctcattagccagcgcgttccggaccgccgaaaggcaattttcaatgaaattgatcgcgagggtggttcgacttggtcccaagttcttgcttgcactaccaatgtaatcaaggccatcaacactcgcatcgaggaaagcaaaaatcccgcgcctgttaccaagcccttaccgcaagccgagagatccgagcctattcttcaaactctcccgcgactttcggaaccgatcaaagatgaccacatctttactactgccccgaaggctacttcacgtcaggacaaatttggcgatgcatttagctcggcggctaaatcaatcggtcagtcagaagactggactccaactgcgcgagcccgagttcgtgatgttttcgaccgggcatcatcagcaatgcttagccctgagcaaaaacagaaatatctcgcctctgcgcagaagttcaagctacttaccggcggtccctccacaactcataaacccgaggacatgaatccaattctggcacagattcttcgttcgcctatcggccaacctttccgtcaaacatacgctcaacgcctctctgctattgttcttggcacaccagagtcctctttatccttgattgtggatgccgtagagtccttgactcgactcctcgttgccagcttggccgaagatccatatggcaaagctcaggccgatgtacccttagccgtgcgacttttgacccaaactactctcaccctggatgcatttgcccaccagggtggattgcatgcgcactggaccgatatcaatttcccgccatcgagcgatccccaggcgcaagcagttgcccgtttagttccagatgttgaaatcgtgcttgctacacttcgtggtggtctcaaggatctactgacggccttcagaccttacttgcgggatatcggtatcgcaggcaaggatttgaggctcgcaaaggaggcagctggcatcgacggggaggcggtgttatgatctatgtctcttttctgccgcaattttttaatgctatatctcatgatttctcttcacaaaacttcatgtattgctatttctcgtcctgccctctagtcctatctagattgatatcagtggacaaatgcatggttaggcgttttgttaagatgggcgtggtgggtgttggttgaaatgcaatatcagcttcagtgaatcaatacaagctttcccatatttccatcaatgagatcttcttgaattccaattaatttgtaaagagatccctgtcggcgagctgagataccactctgcaagagccttgaacgccatcgaagtttcctcggggaaattgtacagcttagtagtacgtaggacgagggcttggtcgttgaaataggactcaaaagcgcgggcacgtttgcccctgaatgagattagaaagattcatagagtacggtaagcgactattcaagcgactataggaagcagaaaggaaaattaagaattaccggtaccttcctatgctaaagaaggtttaccttccatagctggcctagaattaagcagagaaatggtaagagctccccacgaaaaattatcccatccgtcatgtcagtatcgttgtatataaaggctttagtgtatgaaatgtttcccacgaatattcgtcagcctggaagttccaaatcgaggcttatcatccgatgaaaattcttttgaggtttgtaatagctaacacttcccatgctattagacgttatgatctattggagtgagtggtcgtctcactcttttgaggtccacggaggatatacactcgtcgggaacatatgacgacaaggggcctgctactttacggacctgtcgacatggtccttgaaataagtatcctcaaatgccaaagttgagcggacttcatcaataacatcctctagctccaacaggactctgcggtccctgtaatcgtgattcagcagctatgttgataagacatgagatgggatggatggtgtagatagagggagttaggaaatttaaatttagcaccataagcgccttttatctcactagctctatttctatgaagcatatatataaccatgaaagaaatgatgatctagagagtaatgtggggaagaatgtctatggaagtatggatcacatgacattgatttctcaatcaacactaacctcatcaagtccatctacacttgttcaacacaactccaagcagcaacagaagctctaaaaaactggtagcttagagaaaccatttttctttaaaattatgtcattgacaaacgtctaccatgtgcgtcgagtcgcggatacctctgcaaaagcgtgtttgatttgttacaaaccatcaaccagtgtgatgatcacaccggacaacaaggtatgaaatccgctctcaaacctttaatttggtgtacactattgtttcttcacctaatatcccatttttatacatgcgaagtggctaattcacctaggacttcttctacgtctgccccgcacatttgcaagacaagaatttctgctctccaatcgtcgacacagaaggccaagcaaagcgcctcaaggaagaggaaatggccaaggagatcgaaaaaataaagaaagaatatgaagaaaaacaacgacgcaagaaagagcgtgagaaggcctctaacaaggataataaagaggaaaaagacaagggcaaagataagcccaaagatgaagataaagctgcatctgattcaaatgcaaaagatgaaaaagacagagatgataaggttcgtgtctttccgcagcaaaggaaatcaagcatatacttcatatgaacgtgtttgctgattctccctgccagatcgcttctatccagaaaggctctgggacagagacaaagtcagatgattcgcctcgaatcttctccttgcacaagtatgtggtgatatcgtgctcatgatagtaactctaacggcgaaacaggaatttctatcagatgcgcatcgaccggctgcgcagcattgaaatgacgaaacgcaaccaggaaagattaaggcaaccttcactgtttccgtctgtaccgtcgggaaatccttagatacattcgctcatatacttggggagtcagtatgggtagttcgagatacaaacgctagattggttcgcccatcatcctttgccgatctggcaggcacagtgaagatctatgcgaggggaaggtgatacaaaacaaaggcatgtctggctattaatttaatatctatgactttgcgcagcatttttgatactcccattagtcactgattatcgaaccattttactctgttttgacagggttgcggaaaagaacagacgcaaccgtactgaaatatcataggagttttatttccacatctatacatcttctattccttaggacttaacacaattatccgcgtgtcatatagtcctctggcaaaaagaaagctcaaagtcatagacgtggtattggccccggcacggggcagacacatacagccctagaactcatacaatgggcctccatttacaaacggaattctgatcctgcaggatgccgattgcagtagtgaaacctccaagctggtgacccgctcattcttagcacacatttttctacgaggcgtccaacgagactacgttttttaaatgaatatccagccactctggggaaatgcatatgccagatcggacattgaatttctatttcctgccataaatggcttggtgtcacgatgctctttccgtattgcatgacctggaggtgtgggtacaataagcactagtcaactagagtggtccacaaacccatcataggaactgcatcagccctagtgggcagcgtactcggtttgttcctgtgcgtttcgatagaaccattatttgtatatctgctgcggccttaagttcgtatacgtgatgttggaatgaactcttcgtgtctgtagactgccatggtacatataccgatatttgtactctcgcctccgcgtcgagacttgctccaactcactctttgtagtctagagctcagctgtgcactcgcacctactagttcgaactgtcgtctctataattgttacgtttctcgccttagctactaattaataattacatgctagttatgccgtcgtttgtgttaatgtactatgccatctcaatgcgagtccttatacggagtacatagcccgcaacatagacaactatacccacaacacttcaagaccgagacagacgcgtgagattcaactccatttaataatacagctgcctggaaaggacaatatagaattattgaagaagcgtgtctcaaatttgccgattgaatgctgcctggcaggatgaatagtgctttactagaccacgcggccaactaaactagcgccattcatataggaggcttatagaaagtgctgagataaaatgaccaacttaggtagacacgattatacctcgtatacctcgtatagattactccatagtatattggccgacactcttactcatgtgagtatagtagttagtagttaaatggtatagaagtgctttatttagctaaagtacccggcagcctataattaactagttatccagtagccgactaattcaagatgtcgatgagacactaggcttttcaatcaatagatgcgcagatatcatacaacgaagtaagactgttgtagtcatagttactgttttgaacggcaagctcttataatatagattatccagatataaataagccactatactcctatcatccattaatcccagacagacctgaaacaaagttaaatgccagcgctaaaaccgcatctattgataaactatgtaacaatgatgcgagtcttggaaatggtatctgtgcatttaataagccaagccagaccggatgggaactccactccaccgggagctccccctgcaaggcaatgtgcactgcccacccccacagggaaagggttgccaatcacggtatagatttggcaagtatgtgccgtctagttagcctgtagtgcgtaggggcaccaatgagaggtggcagactaattagatctacgattagcaagaactacacgactaatgtatgctattagcgatgtatatagtactaaaacccccaattagaagacaatataaggtcttcgttgaaagatacaagatacaataaccaatacataccagacagatacccgtaataccaatacacataccgacaaccaatcgggaaacccaggaaacagacccgctttgcacagcctccttctgcctcaaaccttggaagtcgaaggggggggaaatgaatcggtcaatcccagcgtcattggcgttacgctgatccttaaaacattcctcaaactgacagcgcttcggtgagtggggccactttaggaagaaacatcgaagtaaagaaactctggagcgaaaaagaggaagaagaagataagtggagtatgcgtttgcgtggatctacccttttgtgggcttggtgagaaactcagggttgtgcttggcgcgcgattaactaccatttttgtcttggctgggcgtggctcgactcgccgggaataataaacacgagtcgagactttggcacgttggtatgcggcgcagccctagggtaggttgggtaagccggtcccgacttcaattggttaccatgtacgattcgaaatagggctttgggtctgtctcatatcgccgatgctgtattactctctatctttgagtttgtgcaagatgcaggttttgatttgtgggacatggctcctaaccaacgggggtggtgaatacggatcaaagatggatggataggtacatgggctaggtacatggtggcttgaggcggacatggctcgtatgtttgagatggattgatatcataagtgctgtacagatcagcaggggcatgtccgctggcgtgccacctaattcttgctttgtagatcgctggatggagcacggagggatctcttgtcggattcagcggcttgtctagaaaggtcgcagtgtgctcgagcctcactatgccattgtcgctgcctgtgagtagaatggaatgagaccaggcagtcatgttcttatcgccagcgacaatgttcactctccacgtgggtaggaggtgttcccaaagagtaggtgcctcaattatgacccagctggcaagaaatgatggcttccaagggtccctcaggtccgagctcagatgtaccacatgtcactgacgacaaggcgcgtgagcgcccatggttggcacacgatcatctagaaccggacaaaacccataaatgagccataaacaaatgtaagttggagctgtaagctttcataactcgtaaaactatgtatgcatgtatggtgttcatcattcatctcaaagattgccacgcccagagtcattagctggcagggcccgcattcccggaggaagacggatggcagggttagcgcgagccatgttgacctggtatgcgatatcgacgcgggccttggtcagaccgatggctggcacgacccaaccaccacagctgcatcgaagaccctgccatgcaaacttgccgacattagacccgcagacaggattagggcaagtgagacgcccggagaggggggcatcgtcaggatgagcgccgtatgttgtatccgcgccagcatcagctccgacctcagatgggaagagactgggacgcatccaggtcagggggtggaggaagacatgcccgcaatcggcagttgctgaggacttggcagtgtttttcttctcttcttcatgcgggatgatgaatggagtcgttgccaatttggttctgtgatgggtttagtttttctgaatatgggtttagatcttcaactgtggaactaacctgcattttcgacatttaatctcgaccgttcgaccggtagggtcttgggattgaacgggctgttcatcttcaaatcgcacagacttcaactctggggcacggccacacgctacacttccttcgacatcgcggcgataaagccagcgcttatacgatgggtggtcggtgacctcatctgggcagcccatctcatggtacaaattcagctgttccatgaagccatcgtttggctcgcataggggcctgctttggcggatcagcgtaagggcagtttgcggtgtgagtgctgccggctgccggtggagcaggtaggcgatgcaaatggccgcggagcgggacttccccatcgcactagatcatattagccagtgtacatctttctatgataagcaagactaggggcaaggcttgtgggcttccagtaaaagggtcgggccaacgcgcatcagaaccttttacgggattcttcagccacgtgtagatcgcacttagatcgcacttgatcggatacgcaatgacgtaggaggcacaaagccactcgagaatagcattccgcaagaggaataggaacgactgaagagccgggacagactttccgccagtaaaactgaaaattttgcgttttgacttaccagtgcacgagtacacctccaccaccgtctaggccggactgaataaacttgatagcggcggggatttgttccaataaattttcatcgtcgacatcgtcaagtcctatggaaagatgctggtaagacttgaacgtctccatttcctcagctgggttgagacgcagcaccgagagaacatgcgagatatctgcacgtgccaatgctgctttgtttttggcgcttaatatgctacaatggcgcgttagcaatgaataaagaccgcaaattaggaactgccaattccatctccagcctcagctccattttagaaacatctgggcaaggattgtctgttagcgaagtgagaccaaccctccgacatagatattgtggccttttatttgattcatggccattttgagatatggtggctgcacgttgacagcagcagtatgttctgttgatggcgacagaaaaatacagaatttagaagctcagctccagtgccagtttgataacttgactctttttttcgtcctagatcgcaaaggcggaggttgagcctcggcgctgccaaactcaaaaagtctgatagggcaagggtatgacaaagcaggtgactttgatgcctcaggcaaatatattgattttccgattttccgatctagtatagttgtcagttgatttgaactccatttattagtcctcgaagatgcacgagtacaacataagtacagctggaagagagtgtggatttgtatacagcgtggcactttggtggtcatccactatgaggatctcccccactctacggagtagggctgtcctaattaagtaaattaagtacaggattacagtgtctacgttgtagttccaggtgtttcgtgcacagatagattaaattacaaagaagtctagccgagcgttttccgagcgtcatttacatccaacaaaggtcaaacaattgacgtccttagctgatgatatgattcgctacgcgagctgcaaggggggggggtgctcacggggcaacaaaaaaggaagctagatttaggcttagttaggcttaccgcggggaacttggacctaaactgatcaggaatggagccataaacggggacgaagccatatacggcctcgctactccgtactccatacggagtatataaaaacggctagcttgtcccgcatcacattgactagaggcgtgacacgcgcttctaggctgcagccctctaaggcttaagctgcctgcgcctcaggaggtacggagtacaatgcagcaatacacgggctcttgcagggcttggtttttgctgacggcctgggcaaagactgggcatgtcagccgaaggcggccgaactaaggagtacaaaatccgtcaacccctccctgctgacggactaagtgttattgctgcctgtcactgaaaaatgcggaaacgcctcgatgcagttgtgtagcctacctagtcagccgtcatccgtactaagttaacgcctcctagaatatcaactagcttgacgatgacgatcgatggaaaatacatacatacatactggagcctgaaacttattaaactggtctttggtacgaagtacaacatacagaggatgaatcactgtagagaggtattaacctcccgccaagagattcactaccaagcaattataaaaccctgatgtcgagctacctaacggagaaagcctgcctgttggaagaaaatcattactgcgtacagactaagatgcttgatcagaagatccgatcgtcatacgcgtgataaggctccaggggtatacatataaatctcccacccgattatagtccacacatatattgtatcaatgtagactagaactgaagtctaagtacaaggatggattgcggtatgaaatatacaccatttccatttagcgatatttcccaaagaagaaacccaaaaagagatttcgttctcgaagctgatgtggagcaggaatccgcttactcagccctgccccctgcagccctggagggtttgttccaacgttcttatttctcttctccccttcatcgccaaaacctaggccattttcagtgatttttccaaccgaattgcatgcagcatgtcttgctcgatggatatttgatcataccacaagcgtcaaggttcacacccccctacgcccaaatgacaggcggaccggcagtgtggcagtgcatgcaatgccaggcgccaagtggggggcgctagtaaatcagtgggtcgaaatgtccaacgactgcatcgtccgctttttttatgtggaggcaaaagaatgttccctaatgaatgtagggcccccgaatcctccgaacgcacaagatctcgtgtatactcatcgtaccacgagttgcacatgtatcgtacaatgtacacgtacttgcgcggcagttcaggatcaaataaccccgattaaccgggggtgttgtcgcatgcgccccttggctgggagatattaagcctaaatgccaagagttccaagccctggtgtgttctcactggttgccaagctgcacaagaccgtgccaatctatacttcattctcccaaggactcggcgggattgcggtacccctctctatgaacaagtttcgattctagaaaagcataaaccatggttcctaggtgtttctgtcgttgtcggggctgggttggtctcaccgaaggacctttcaccttggcgtagggctaataaaatacaaattttgtgttttttggcatgagacttggtagaaggtgagattaaagaacgttatatacatcatccgctgggtcgcattgcgaggcgtccaatatacgagaaacccccacctatccgcacggccattcggcaatgttctggttggcttccatgatcccgtcaaataatgtgaagactccatatggggtaggatagtgcgtcacatagatcagcaggaactgttggaacttggaacttctgggccagtctattgattcccggttatggactggaccatatattggagctatagaagtgtatcggatatctacaacatacgtaaagcaaaattacatgtgttaacgctaagccttgtgccctaagaactgttgtcattccaacgtggcttcccacgcaagatccaatgagataattgtcaataatctaatgtttaattcgacctgaatacccataactaccatctataccccgtagaagcaatccattggaaaatacacaacgtccgtaatggtatgtaacagccatgacccatatatcctcgatacatacatatacgccctttccacgtcacccaaagggcagccctggccctgcctggcctgcctggcctggcttgggatgtttcgattctttttctttttcttttttcttttctttttcgcctcttcgtctttgattagttgaaaccttcaaatcttcatttttcccttctcccttgaggatgagatcacctcaacttgcccccctctctttgcctgaattggatccaatcgcttgcaccgcccgaattcctacccgatacgatctgggcgcatttcaattctcaccttttctctttttgatttgacctttggttttgatcttcagctccagcgccagccggcctttccttttgcccttttatttatttgggcttcagctagtggggttgccatacttagagtgtgtgtatttctttatactcaaataccggggctccatggcaccattctaacatgccctagttctagctgtgctattcttttctattccccattaaacatgtgtgcatctccccattgagttacagtgtggccaatttctatgggacacagacccggttctccgtgtgtcacttgcgggaaaacgtttcatcttatgaggcgaatcgccgaacaagggtcccgaggtaggtcttcttcagccctattcttcctactttcctaccccggtcttttattatcacgtcaagcccactttcaaatcatctgacgctcaaaatagactcacaagacttttatcacctgcatgaagtcctctaacattgtcctataactactcttcgactcaagtaggcagaagctggaccttctgagaaactccttctcggagtgtgaggctggtgaacggcccgcttaacaatctgaactggtttcacgaccgacatttgcactcaactggattgggttattgctgggataattgagatcttgattcgacctgcttgttccgatttatatcaagctcgactcttctgctttactgggtttctcagctggatgcgtgcccatcttgatctcgattccggctctatgttctgcgtctagaatggaccttcgattttctcagtcgagcttctatgatttcagacagcacagacgccattccgaaagatcccaatacgctatgcccgagctgaccgtatcatctcacggcccgttacctatagccccacgaaatagagctactatgaaacctgcgcctccgccacttccgcccccatccagaatccccgctttggagatgggccatgaccccggctggcagtacgcaaattctcaaactccgacttctctaccgtctatcaacccgggctcaagtctgttcggaggtcatcgacggccggtaaccgcctcacagggtgatccaatgcagatagacgagttagaggggaggcagggagctccactctcgcggagtcctgaaactcagatccagatccagccaccgccgtcagctacagacggatttccaaattccatgtcgatcatcccgaatccgacaggtccagtgtaagcgcacttaatgcgcgaggagtgcgaacaacttggtttcgcagtaccgcgcttttctatatctgattgctaacacattgatagtttgagtggcgagcgcgaattttcactgcgtagtgtcaaagactcatcaaatgcctacgatcaacatctattatccaaaattggaaagcctcaaatagcaaaacctccgtcccccgggggatctatcagtcttggagacagccgaaattcgctctctgcacttacagttccttcacgaagcccaagcaatctgccatcacccgggccttcagaagggtcaacgctggatgtgaaatggcacaatagccctcagtctgggggcgtttccccaaggacaaatgtcaactggagagagtatgtcgaaggccgaagcccaagcgtggagagcaatgcaccatcagcactggattacgaccaaggatctttccgacgccgctatcgtggaacaacgccccagcgagaagatagcatcagtctaccgagccgatcgaaccgtggaagctatgaccagggcgttttttcagatatcgagggagagttttcggccgatgagccggcacccccacgacaattcattcttcgagagcccacaccgccgtatccggattctagacagggcatgaaacgacgggcatcctcacctccacgtgagccgataagcgacgatagacataccttgcacatcgcgacgagtaacggagacttgtctcagcgaagactcagtggtcatccgttcactaacacactatcggtcaaccccaactatcccgcgagtcaacgaaccctctcaaccggctcgtccttgagcatccggacctcgggctcgtatccgtctacgttgtctattggaggtagcagtatgaccagcctttctccgtacgatcggccgtctccaggtggtttttcaccaagctccgacctcgatactttccacgagaaatcaatcctcaaccccagtcctcctgcggcgctatctcacgctacccttccaagattcccagggcctgcgtcgttagaaccgcctgcgacggattccactggaaagatgtctgtcccgactattatgagtttgccaaagccagccacgccgaagatcggcgggcttttcatctgcgattgctgtccaaagaaacccaagaaattcgacagcccagatggcctgcggtaagttgatcgagacgtcttcatttatgatccatactaatttagacagtgcacacgagatggagaaacagtacgcatgcgcctactgcaaccaccgcttcaagaacaaaaacgaagccgagcgacaccaaaactccctccacctccgacgccattcatggtcgtgcgccgcgctcgtgactttccaagcagcattccacccctcaggcgcacaggcctgccagaccagtgccggggctgcgcgtgacacctgcggctactgcggggaggaattccccaatttcccacaggcagactgggaccaacgattcgagcacctgaccaccgtgcacaaattcggcgagtgcaacaacgcgaagaaattcttccgcgcagaccacttccgacagcatctgaagcatagccatgctggcacgagtggaaagtggactaacatcttggaaaatgcttgcatgaaagaagagcagccgccggagcctcgcgagcctcggggaccaaaggataaagctgcttctggcccccagactgggtcattgacgaccaatgccatctcggaagttattagtgagcaatgacaatcaataagtcgtgtctcccttgatcgcggatttgctcttccttgtggcatccggctacaagacggtttccggcaaacggctctgtgctgttaatcacatttgccagttcatactctgcagttagatgatagtccaccctcgtggcatcgtctactctttttggatatcgagactaaactcatttgcattgtatttgcaatcatgggtattaaactagaattctgaatctccaccacatacctgttcataaaaagacagcatcacctcaacatcaatcaacaacaatctcactctcatcacaccggggacattctcatctcacaaacaaaaacaacaaaaacaaaagcctctcatattcattctagaaaaggcaaagtgagacaagacacttaaaaaaaacccacacaaggccaaaaacaagcctgaactcacgacctgaaacgaacatttttgaacatttccttttccacggaaagagaaaggggggagggagggcgaagggagtttatagtcgggactgggatctttttttcaggatcaataaaaacctctgtgtataccccggttgcattgcattgcaatggggaggattttcctttctcattctcatctcatctcatcttttttaaaaattggagtcggtttcttggttggttcctcgactgggtggactggaatacaaggatgaatggaatactggatggaatacctgcgttcggtttgtgtctattctggtttttgctgttctgctaggctcttatatatattcccccgcctgttttatacatactttggatggatggaactgtgaggcgaatggaggggcgttgtatatatattctttttcttttgcatggtagcctgaacgaaatatgtggctttatgcctttttctctagttattttggttctttccaggattcgctggtaagtagacttttcagtattaaatgtaaatcctcattttgatatacagatacacctagtgagtaagtaggtaatgttccactagagaacaaagtaaaagcacaattattcaaacacaagactcttgaacccatctaaatctaatagaaaaaacagcctggcccaacccagaaggaaaaaaaaaaacccaaccaatctccacctactcagtaacactgtccttaatactccgcagcgcactcaacttatgctgaggatcaatagcagcagccatctgcgcccgacgccgggcatcagtccaaaccataaactcgccataccccttcggcataacatgcacatccttctccacaaggaaagtatagttaaacatgcccgtggacttcttcgtgccgtgctcgacatcccgcaccttggagtcaacgcgcacctgcaccttggtgtacttggtgctatcaccctcgcgctcctcgggctccgtgtacgcaaccgtggcgcgtaggtacagcacgctgcctacgggaacggggttctcgaaggtgctggggtcgagggcgacgaagtttggtcgcgcgtgtgcgaaggacgcggcgcagcagaaggccagctcgaaggtctgttttagtaggaagccgccgaagatcatgaagttgtggcggttgcgatattggggttgcatgatcatggcggatttgaggacggtctcgcccatgaatacctggtttgcggggcgggtaactgtgctttgggggtctggggaggttagttttttttgcataatgggtaatgtagtgggtgaaaagcgcttacttaagtaggacatctcctttgtccacattgagtggatcaggttactctcttcctcgtcaggtgctttctccaagaggctgcgtgtgcgacgggccttcttggcctggtaattcgcctcgcccttttggaagaggcgtttttcctcttcagtttcaatgatgagaggagctattgagacaggcctagttggctgttagtttgtgtgtatcacgccataagaggagaacatacttcttggtagcaggatccagagagaccatcgtgaaagcacaagtgatcaagacatcttcaggtttcgccggctgtccttccgggcgggccttattgacctgaagggagatttccagactggagcgacctgtcgcataggtacattggccgctgagctcaaggtcacaaatttccatcagcggattctcaatggtgatccggtcacacgccgcagtgacagtggatacaccgtcacctgtgtgacggtaagcaacgatgccagctagggcatcgaggtccatcagaagcgagcccaatctaatcgcaatcagtcaaatgcccctttgatatgtggctatcaaatacgcaccgaatatgcccagaggaattgagataagaatccaaaagccatttgtcttgcgccaaaggcagaatctaccaaccagtcaataccaacggttccaaccccacgatataaaaatttcatacgcacagcactgtaatagctatccgacatcttcttcggcgtgacatcacgcttaatgctctcatcctcatgcgggccaggcttctgagcctcgcgcatttgtgtcaacgcgtcgatccacggagtcttgacgcgcatgggcatccatgttggccgggccgctgcctgcgacggcgtggagtgaaaatcctgggtgttgatgcaggatggctgagctgcgactgcagctcgcgcgggcagcgcagccaaggattttgagcgagcgagcgctgatcttctactgaggccgaacattttgatgtcgaaagaagggggattaaaaattagataaggatgtagatatcggtcgattgtactccgtactcaaaaatgacgatgtcccgaggctctgacgttacggatgtctccagtgaccaggacagatttaatcacatggtaggttggcagaacgttaccgccctggtcgctggacttttacagtgaatttactggcaatttacttgattgttttgctgatttgaatggcagttagttctgtggactaaatttcctggcaaatatactgaaacctacatattctaacgagctgaagtgatagctcatgagtctataaattacgtatctcatggtcactgcagcgcgccgtgagattatttaccggctccggtgattttcggcccggataagagaaacgatgtcatcacttccgattgggaccccgggtttttatattgttctgtagatgtttgcagctgaaagtgacacctcgaagcacctgaaatggaatacaaaaatctaagactaaagaatcacaatctagggactcgattattgctccattcaagctgtcggctaaaacaactcccggttgccatgtgtatctgtaagggttcttagcagtcttgcagttcggaagaaggttgttctgtatcatgcaaaactgaatacactcatccacaactcctttttcatttcattaaaatgcggagggtatatcgtacgatgattgtatcttggagttcatttaagcttacatatagaaccaaactttccgatggccaaataacgtcaaaatgaagtcatcaatctgatattggtttataacactcacttcaaggcgattaactctttttttgcatctattcgaattgacattgacttgaagaacctggaataaaaacaacaacatctatttccaacatgagtgacccaacaaacccgcatatcaaagagcgcaacacacctcaatggggtctctaccagcgagagaacttcatgaaacagagagaaggaacgacaccacttttcaacactggtatgttttcaatatgatctctccaaacctacagaaaccctaactcttttacagacccccggaaactggaagaaagagccaaagagaagctgaccgagggcggctggtatatatacctccccatcacacgagctcaagatccataagctgacaagaagcaacaggtactatgcctcctcaaacgccgggatgtcaaacacgcacctcgtaaaccgacaagccttctaccgccaccgactaatcccgaaccaattaatcgacacaaacaaccggtcaacaagaacaacaatcttcgaccacaacgtctccgcaccaattggcttcgccccaatcggaatcaacaagatctaccacccaaccggcgaagcagcagtcgccagagtcgccaaagagctcaacctcccctactgcctatccacagcaggcagcacctcgatcgagaaagtcgccgcagccaacggaccaacaggcacccggttttaccaactgtacatgccgcacgacgacgagctaaccgtatctctgctcacacgggcatgggaaaacggcttcgacgcgctgattctcacgacggatacgtggcagctcggatggcgacacgacgacgtcgcgacgtccaactatgcattctaccgcgggttcggcgcggacttgggacttacggacccagtgttccggagcaggtgtcttgcggacgggattgatcccgatgtcgatattgtcgaggcgtcgacgaagtggattgattcggtttggcatgggcaggcttggtcgtgggagaagattccttggttgatgaagacttggaaggagattagtggggggcggccgtttgtgattaagggcattcagtcggttgctgatgcgagggggtgtgtggagcttggggttgatgggattatcgtgagtaaccatgctgggaggcaggttgatggggctgttgctagccttgatgcgcttgagaagattgctcaggctgttggggataggatttatgttatgtttgattctggggttaggggcgcgagtgatgttgtcaaggcgttggcgttgggggcgcggtttgtgtttattggacgactttgggtttgggggttgagtattcagggtgaggatggggtcagacatgttatgaagtcgttgctggcggatttggatattttgatgggtgttgctgggtacaacggggttcaggatttcaacctagatattcttggtgagtcttgtctttgctgcggtgtaagagtgaatgctgattaggagatgcagagtcggatccgaagaactacacgctcatcccagagaagactttgtgaatggagacagaccaggcgggatcctgattaaattgtccatagcatagctggtatagggacagcttgttactttagtctatactcaatctacaagtcctcggctacggagttttacacccctcatgtattccgtaggactcgtcaagtggctatgagagccacgacttcaggaacgtccacgagaaagactggtttgttatctgatgcagacctacatggacctcatgcatatggtaatgttatgatccctgtggtaggtgaagcagcatgtgctacggcactctctgccgacactgtctcgtgggggctacggtgagatggtggccagagagatggggagagaagaagaagaagaagaggagaagagaaatggggggaagggtccttttatacccccaacccacgtgccttcctcaagtgcgacaggtccctcgctccttccagtcaatgtcaatgtcacatgcattgtgccttctttgtttgccttctttgtttacattgtttgcatagagcacttccaaggaaggtgcatcgactagacattacaactggaaactgtccatgagggattttggcgccttgccaataatgtagacttttgtctatataaatgaaaataatagcaagccatgtccagttcaaacgaaggatacatgaatgtgcaacacaaaagagtgatatatgcagccgagaaaagccgaatagacaaagtgccgcaaacgtatgctagatgagtgggctaaatatgtagacccggtgtatcaacagaagtgacatgatgtgagtgtacaatgattgacaatatgcacagaaaagacgtgggcgacaaatgagtgtacagaaatagtaatacaaaggcagaaatgattgtcgccaaatcagaaaaaaatgccgggaagggaaaataggctaaaatgcagttcaaatagcaaatgcgccgagcatgaccgtcagcatagaccagctaatgccgcggacgaggtgggatgcagagccgccggagactgtggccattgtagaggaggtcgatgtagcattagcggcagacgcagcggtgccattggacgccgatgcagtgaatgttccattgcccacggatgaggaggatgaggagtttgacttcgaaagcgcgccgaatccgatctttccattgtcgaaatcaaacacggtgtagacgtttttcaaaaagacatcgccgacgagccagtttgcaccgtttgatgcatagccgacaatggtcgaaatgcagtaatctgaaccggtcgactcggtatttccgacatagtccttaggcgagacgctgtatttgacaccagagaactcgaactcgatagtagcagtcgagttacaggggatcaagtagttgttcgagttggaagactgttgggatgaaccggggacgagagaaaacaggactttggcatctttcggagggatcaggaggtaggtagtgccggtgtcgatggtagcggattttccggtgaagttgcaactctttccattcacataagcatcatccacggggatgctccagattttctcattggtggcagtataggaaatggtaccatcgaatttggtcgtatcgaccgcaccaaagttgatttccccatccttcgcattgtctgccgagcgagagagactgaacccaaccaagtttgatttgatgagctttttctccgcaacaagatccatgaaagatggcaaactccaccctactgtacccgagcgacccaggcccaggatcccgtcgaatggataactctgaaaagcttccgaggcattgtcggcttgaccgaaggtttgctcgacttcgagccctgcaagggagattgcgtctttcccaatctttccggtgaccgtgccactgccgtaggcgagggtgaaagtcgaaccggcggtggtgtagctggtggatgctgactggttgaaagtgtgatggcttgtgcagacaggctccgtgcattccgagtcgaagacccaggtattgggtgctccggtgtcgattgccatccacatttcttgcttttgggaacctacgaggacgggagagaagtatgaataatccgttccgtcctggtttaacggggcgctgtttgccaatgacggcgtatgggactcgacgatcttataggtatcgtcgcggcgaacgggcattttctttaggtcaatggtgaaaggtttcgtgtcggctgcgtcggtactctcatcgtcagatttggcatcaatcaaggtccatggaacgaagcgacgttcgactgtagtttccgtggagagtttcattcccaattcccatggatagaaggcgtggacgcctgatatgccggcaatgaagaccagacatgatgaaagatgcatggtccctaggggagtttaggcagaatatagagaagcccgcatttgatagaccgaagccggattcaattgtatgtctcttcatgcaatataaccgctgtttcctggtgagccgaggaattgaaccgagcagctgaatgaatgaactaagtgacagactaaaattgaaaagaaaggctagaaaagaaggtatgaattataaaatgaattgtaaaggcgaggaagttcgagagactcgaaatgtgaaagatgggaggtggcggacattgtctccaccgttgaaaaaacccctgacaagaagttggccaggctctaagccgtaagaggaatagtttccaccttctaaggctcgttttagtactgatcggccgattaaatgaagctagtggagcccaaactcaatgtcctatagaaggaactgaacgagtcaatatttgatcttgaatcttaatccttggactatttttataccgtagactatggatactttagagaatctggggagggaatgtatcaatggtcacaaagtaatggaaactactccatatgtactttacatgaagttgaacagcaaacgttgaagtttttcgtgggaacacatacaatgtaaagatgagatagagcgaacaaaaatggaagcagtaaaatctcaatccgcagaatgcgatgcgacgatatattgcccaatgcccagacaccattacaacgtaaggtctagactcgcaggatttacgcctccactcgggtcgagaacgtctgaccctgataaccctgacagggaccacttttttttgcagctagtacataccgcaagtcactgttcgctgaactattcaaattgattcaagtttaaattccagtacggattttgggcatttcgacctgatccaattgcctgaagtaggtagatcagtagaagacctaaaacggatcgaacatgtagatcgtgagctaactgtggagacagatcaatcgaacacatccaggagttccaccgctgtgtcacaagctgtgcgtactccgtatatcatgaaacaaagccagctatctgaaaactaataatttgtataccatatatcgctagataataagttagagcagatgttatacgagtacaaattttataaaactactgcctaccatagtgacactgtgcgacatgttactattcgtatctcggtataagcatacaaaagttggacattggtggcaatatctcgatttcatacaggagtcacgacttttgctattgctccatcggaattgacatttggaatgagcgaatagttactgtatagatttaggtcggctaaatgggcctagctatggagaggggaactgcctggtaaatagtacccaattatgcccgaagaaccaaagacccaaggaagcacacttcatgcccaaggatctttagggctatctcgaagtagataaaatcatcctaacaaagacacagcacccgtagatcagccacaaccccttaactacggcccaaacaaccacaaagcaccagccacatccggcctcaactaaaacaacaaaaggaagaaaaaaaactccaatgacgcaacatccaacaaacccccaaatccccaaatccccaaaaaagattgataaaacaatcagataatcaccccagctcaccccgaaatagcccgagcgggacctctcccttccccacgacatccaagccccatcccatccgtcccaccgactcagcggcaccaggaaattgcacggcaaaaaaacatacctcggaaccgcgaatatattaccgcggtgccgatagacacacggcaagaaaagaaaaagtgggctgattcgattcggtatccttactactagtctacataactagtactagcgccggtccgtctgagcgcgaacgtgcggacgccattgttccggcggtggatagggacagttatcggcatccgggcttaactgtaatttttagggttattggacacccatctcggcaggcacacatgcgtccgataactaccgagtatgtagttagaccgcagtgtcatccgatgactcacgtctggagctccgcggctggtctgctgacctcgggtcaacggtgtttttttgattaacggcggaggagagatgcccggggaactggatcttcacttgttgtactccgtagatcatggtgggtactattggatttactgcctcggcacagcggagaaggtgtttttttcgggtttattccgcgagtgagggtattgggtcattgtggcaatggattgtggtaatttggtaatttgtagattggaaaggtatgtggatgaatgtgattgtgtttgaattgctctcgctttgtacctatctatttgctgtatctaagtatttagtagggtatgacttatttcgaagatgtagatagtaatgttcaattgactgacacaactcgacacagctgtggaataagatgaaaaagaaaacaaaaagccatgatcggctgacatcatgaagacgtccacatgggaaagataatacatcaaaacgctagtatctcaaaacagtccgacgaacccaaacatgaaaaagacatagcgtgaactatgtatcaagcatcacaagaattgtctcatcccgtcaacaggaccgaaaacaacaagaatagaccaaagagacagaatctacttcctgacactctgcttgggccccagaacatcatcaacgaagccagcccaaagctcacgtatgacaccgggctcggaggtaccattttctttgcgctggagctcctcaccggcacgcgagcggccgacggcctcggtcagcgagaacgggtcaaagtcgacggcgtggttatcgacgacctcgctcatcgcgctggcctggacgtcggggccggcgccgccggacacggtgtagatctggggcttcatggatggggggctaggcgtttggagccttgtggagggcccggaaaggaccgggacttggatggggcgctgcagaggggcggcatcgagctctgccatgctgggcatgtagacgaagtcgacggttgagttgtcgtgtgtggcttttgaggcgcgggaggtgttgaattggcgggaagaagggctagagtgtgttagttttgggtttcttttttgaggggttggattggaggtaaggatggatgtatagaatggaatgtgtgggacatactctgagaatgcattgccgttgattcggcgcatggcgatgctgaaggcgcgggattggaggacatcatggttggagagggccttctcgccggggttgacgggttgagcggcctggactccggtgatgtgaaggctacggcgagcagcaggtgccacgggctgttgagaaagagcgcggacagcgcggagagaagatgaacggggagcaatcattgtgatggtatagaatgtatagagctatagctgtctgagatagagctatgttgggatgcttggtaaaggcagaggtcgccaggtatagagggaaagtggaaaagggggagtgagaagtgagggagcagagtataactaggaaccggatgggagctttatagagcccggggaatggttggggagagctatgaggccacttcttggcggtctggaccgttatcgatagtgtcagccagaaaaagtatagcacgtcaacactggagaaaagatatggagtacaacatagtggatttgttggattcgttggatttgatttaaaatcgaacagaatgtggataattcagactttcctctacaaatgtatcctcttggactaccatggctgttgagtccaatcccccagacacagatctacggcgtaagtcctatcgggactacaccccagcactagcagtgacaggatgtacctggtacatcacttaccccccgaaaatgatgtattccctaaacatcgtatcttcccctcccaaagtgaaactggtgatcattacgtcgtctctggaagatcatccaatgaaataaccaccagcatagacagcggccattattgggtgtcttcctgcagaacggggtaacgcactccctactccataatcgtaacacccatctgcattgtccaacgtagtcccccactcgacgagaagtggaaaagaaggcggagagggtatccggccggagatacatgccatgcacagcggttccgttatgcatattgctctggaatccccgagttgtgagtggctcccacgcccaactggtgagtcagtctgcaccaaaccttggtcgcaagccacaaaatgtaatgcaattccagttctgggaaagaccggggttgatcgccactcctcaacgttgagtaatcccatgacctgatagtggaccttgaatggattcgaagaacaatattccaagaccacggaagcagaggagtggagcggtgtgagattcggagttaggaccgccttccgagtgatctacaaagtacgacaacgtacacttttggcaacagattcgatgtgctacgcagtacaatatgcaacaaacagttatttcgtgcagatgtccttgatcgtctatggtgcgacgtgtccgtttgtcctttttcaatttccagattcatgcgtttctcaccccgcaatcgcttaatatgcccggaacctccggatcaaaggaatcgtgtgagatcagcagaccctacggagtacggaggagaggtgctgtaatgtttttatggccaggggcaggcaagtattcgatggctgtaagggcccgcctggggaagtgtcgataatcttggcaggaatgaattgttcccctttcctccctagatccgagggtcagaaatttggggatttttgatcataggtcaagtaactagtaaagtaggcaaatatactggtctaattaggtaggaaatatattctgtatggtatgtcctaaagtaaatagatggctaacgtcaccgcgctatgcgattggtcaacactgcaatcccaatgcaatatctctcatacgattatccgacttgtatattcaaagtttcgaccccggtcgccgtcctttagctatggcccgagcgtaagggtgcgagcgagatgctggaaccagatggtcaacatccccggtgtgcacgagatcaggggccgcctccgccagggatgtgatgccaatgttccgcatagctgtctctagctcatcttgcatgactgaagaaacctgaatcagcaaactatcaaggcaatatgtcaatcatcacttactgtcaatcagatgctccactccctcctggccatagttagtagcaaagagcatgctccgacccattcccacggccgttgcgcccagacatacagccttgaggatgtcagttccacgccgaataccgctgtccacatagacctccatatgatcaaagacctccgggcagcgtctgtggatctccaggagcgtgataatcgacggcggactggtatccaggttgcgaccgccgtgattgctgagcaagataccatcaagccccgctttcatggcgagaagcgcgtcatccgctgacatcacgcctttcagacacaccggcttgtgcgtgtgctgcttcacccatttcaaatcctcccatgtcagcccaggatcgatgaacccagccatgacgcggccgagaccgccgcctttcttgtcgttctgcgctttcgacggcgacataggcacggataagctctcgtcagccttgacgcgctcgtcggcttcgcgcttaccgggccacgcggcgtccacggtaacgaaaattgctttgatgtttggattcgctgagcactggcgaagcagggcggcggactttgctcggtcccggttgacgtacagttggaagaagaagtcggccgagggtgctgccgtgcgcagctcctccatggtgtaggatgagttatttgaaatctatccagatcgtaagctagtgactgacaatggcaacacctatataagctcactccttgcatgattcctttgcttgcgcaggctctagcaatggcgcactctccatccgggtggatgagctttgccattgctgccggactcacgaatagcgggagcttgtaactcccgccgaggatatttgtccgggcatctactgaacggacatttcttaggactcgcggacggaaccatatgcggtcaaagcatgatttattagcgtcccgtgtgatcagatctgtagctgcgctggagtagaaggcccaggtcttcttgctggcggtttttgaagcgacgacctcgaagtcgtgcgagttgatcagtgtctccaacgggggtttctcgttttctagtatcaccttggcactctgccccggtggtggtttggcccactcagcgtcaattgtagattcatcgaggacgcccttgaacttctccgggtggagattgttcttcattacgctgggtgcatggacttctgaataggctttcgttgcatctctccctgcatgcttcaggatgactattcgcgaggtacatcagatatcgtgctgagatcgtgcatttgtcggtgtactaacttgcagatcctccgggatgctcttctaaaaagtcggtcacatcccacacctgtttgtcgaccacaacccagcagtcgccgggcgttttgtgctctgagatctgctgagcagacagaagtttttggtctgccattgctgtcgggcggtatgagcgtgcgtattcttaggtcagctgtggagaaattgaccgcgatactaaaagacgccggtcctgtatgtcgaattgtgaaggagattgaatgagtggagacaattcgaaacagccatccacagcgagctaaatactcagcaagggtcctgggcggggatggccttcggtaatgtccccggacttaccccggactgcgcgggctaaagtctcccgagctttctgtcgagcatctaactttctatatgtagtgctgtatgttgtattcacacttttgaactggtcttggatgtctttaggatcaccctacgcaatcagccccagacgataagaacagcaaaagaggttggtgttcaatctgagcttacacagaatcactcatgtttgacgaaatctaaccccctaaaggtgtctcgaatcggcaacgcaccgactggactacggatttcgctccgagcggagacttcgagcgggggtgagatatgcctcctgaaatgtcaggcatcattcatcaccagccacattgaatgcctcagccacaatgcggctgagaactttccgaccggaagtcaacacacatttcatgctcgacagaggaaccatctcaacaacacaataacaaggatatctactctatccatctaatgccagtcaactctgctgttggctgtgctttgaaaaattttcgccgcaatatcacctcgggtgtgaggtcaacaggcatagatagacctgtttcgttaggtttgtcttgtgtccaaatacaggcttaccacctagtctagccgtggaggctgagtgatctggcaaagcttggactgactcatttcgtaggttttcataagagtcacagcttgactggtctgtcttctataaattccatatctgctggaaatcccaggacaatctccacaattgaaagacaacagaccacattaaaaatggccgaatctaaacctctccgatatgttgatgtatgtcccctttgtttattttcgaaatgctagtcaacacatagctaactatgaaacactagatcggtatcaacttgagtgatcccgttttccgcggtaaatatcacggaaagcaggcccacgaagacgatctcgacgacgttatccagcgtgctcgcgacgtaggctgctcaaagttcatggtaaccggctcagatcttgtagaatcgaagcacgctgtccatatcgccagcaaataccgtgagttatgagcttgcccggactttccctctcttattaacaacggaattctacagcgggcttttgctatgcaaccgttggtgtgcatccctgtcaagcaaaactcttcgacaaatacccaggcggcccagacaaaatgttggccgagcttcgtactctagcaattgaaggcacaaaagccggccatgttgtcgcattcggcgaaatcggcctggattatgaccgactgttcatgagcgccaaagagccacaactcaaatatttcgaagcccaactagacctggctgttgagattcagctccctttattcctccactccagagctgcaagcgaggactttgagagactccttgccccgaggcttgcaaagcttcccaagcggggacttgtgcacagcttcacgggaacaatggatgaaatgaaccggatggttgcgctgggccttgatgtcggtgttaacgggtgcagtatgaagactgaggagaacctggaggttgtcaaggctattccactcgatcggctacaaatcgaaactgatgggccttgggtatgtacttttcttagctttgtctggattagtcgtgactaacctatcccccagtgtgaaatccgtccttctcatgcatctgccaaacatttagatggtgcgccggatctaccgaaggctgtgaagaaggagaaatggcagaaggggtgtatggtgaagggtcggaatgagcctgtggccatcgctcgtgtggctcatgttatcgctagcgttaagggtatcactgtggaggaagtttgcgaagcgtaagatgttgattcgtcctgatgcttggctctatactaactattcttctctccagtgcttggaataactctattagaatgtttgggttgggcgaggagtcaccttgattttggtattgccgacaagaagatgtgatgattcagggcctttgctgtagctatctaattatgacagccatggcgactgggaactacctagtacactttcgcaattgctcaaactcatggtctcagcagcaaaaatataatgatacatctcaatggtcagggtcgtaaacattatttatgtggtattatatatcacaacaaaggtatcatataagaatctaaagataatcagccattataatgtccgcatcgcatgcctccatatcctctcggggatcataatctatcacgtagttttccggataatccgccaattcgccatgatccgagagaagcatagcatcacggtcaccgtatgaagtctgggaagacccagttgtcgataacaatgtatcaagagatatttgcgtcgattccccgatgtctgtgaagcttgtctcgctgaaattgtccaaaagctggtcctcggattcgctattcaacaagcacacgtcgctttcttcattctcgtcgtgatattttgtttgagaagaatgacactgtcccggattttcattatcaggttgatgctgatctatagacgtaagatccacgagctcgtctaatccagccagtgcgttcgatggaaattctgtgaaaagcatcgaaactcctcttcttctgggttttattctgggcacattgttctgcgcgacacaccaaagggatgagaggactgcattattgcaacttggaagttgaggctgtatcgccaagtcacccgtctgatgggaggaagtgagctctagcaaatctgccaatttagctttggtggatagattcttgtttcctaccaccaaagacgatatggctttcgtgatcattggaattgtcactcctcgctgattcatggcctgaataaaaattaatacccgattttcatgatcgaaactgggaactcacatcccgatatccaggatcgaaaactgcgggaaatatatccgcgaagctcttgatcgtggatttttgtgagacactaaccgtgggatctttgatcgagttggaaatgattagtctttggattccaagatcgaacagtcggaagagttcttcgcttgatggtgatctttttccagatatgcgaacagtctgttgtctaacagctgcgtaggaattctcgtcatgcattggcagtaggattttggtttctaccatttcctctaacacatgaggactcgagacaaccgatgttccttgtccaagaagactaacctccaacacggaacagtcctcggcttgtgatacatctttggcttgaaagcgatactccagccgaacgtcaatcgaagccaaggtagctactggtacaccagggggaggacgcgcatctgggggattggtcatcgaaccaggcaaagtccgacccgttgtgtggttccgtgctagacaccctctgtgcataccaagttggaggaagtggaaaccagaagtttcaatacaatatctcttgagctcaactgaaaatccgagatccgaccagatctgaagcaaggaagtcagtctccaatttgagaaatattttcccgcacacacctccatatcgcaaagtttgtctctcaacttcgagatgaatgccgctgcttcattttgatcccaatttcccccgatccagaagcgcaactcaagctctggtgcctctgttatccatatactttcaagatttgataattgtgagaggtcaattggtatttcgggagttggatgacttggcgattggttgaaatgagccgatgcggccaggcgaagctgcaactttgaatctcggattcgcaaagtggatttacccaagtcgagcgtttgtgccattgcagaagaggctcatcaccaaagcatcataccttcttttggagaccggaacagtcatttaaacgagcgatttggggattggtggggtgttggagagggatggatgcggctacagtacatggacggggcacatgactttagactctttccctgacatcgcgtgcatccaattcttaaatatcactttactttcctgacatgtatttgggttttgtaaaggctcagctgaaaagctaaattcttgttatagatcttgcttaaaatggaaattgctgctgagatctgctcacggcttaacagcaacacatctcagactggcatatgtgatccattgactcccatcttctcttgtagtcccataccggagcattcggcagatctgctctatcgcactattcttcttctcctcggtatccaagatatccagcatctgagcgccgattaatctcatgaatccttccagtccaccgttatcagaggtggtcagctccagcggttgggggttaagttcaatcatcttaacctgaaacccgacactctcaatgatcttcttcatatagacgtcggacggataaaaccaggggcacatagcttccgccgtctcgattggaactccatggttgacaagggcgaacatgaatgctgtgaccttttctggtgcatttccatgtccgcacatctcaaagaagaacgtacctccgggcttcattgattgaaagatattttccaatgtggagatacgggtagatgggtctttcaagatccaatggaatgcagcattggaagtgctaaaattgtatcagcagggttctacaggaagtggaaacacggatactaacactttatcccagtttccattcataacttctgcatattcttcaaggtgccgacaatcgacaacgcggaaatcggtggtcgttccaccgtagtccaatgtcttggccgtgttgatcatggatggggaagagtcaacgcccataacataattgaccgagggagcaaagctggtggtaaacttgccatcaccacatccaatgtctagaactctgtccgtagggttaaattctatgctttggatgagagtgtcggcaaaatgggggacaaaagaagccgcagctgcatatgtctagatttggtcagcgcagacaagacaaggcaagagttcatgaccacagacctctgtagaccaatagtcttttggaggaatctgtgtctgggtcattttcaagtgtatccaagatatatggacttcgtgcagatggttagaagaagataggagcgcttagagaacggtatatgacttatttaagagaatgtatatttctgattgatgaagcgaatcttcaggctgcaatccgctgttatccgagtgccgcatagatttctcgcgtggtcttacaagtttaattaggttgacgtggcactcatgggtaaaaaccaacaaatatggagaggcttcagctcgccacaagtcagtaccgtcaccgccacatgcatcgaaattcagaatcatgatatttgcagatctctgctttagccagccaaatcaaaggatattcacgttggtggagcaagccacacaggatgatgagctttgccttactatttttctatttctggggactcctgagacgagaggcatactttgtacaaaatgaggtttgtaagcgccaatcatgaacgattttagtttctctgtctcgggatatcattttacgccttgatcggcattacagtcccattctaagtacgatataatagggtaactactcatgtgaccagcccagcccactagagatcacttctcgatagcctctcgggtgtgactacgggaagttccgtgtggaccgagaaatagctccagcgctaaactgcgctaaactgctctcgactgggataacttggcatgcatccacaaaatatcttcagctcatggcgttcaccggtctgttccagtcgtaatctcaccacaccgacatcatgcataagcctgggcagtatcaaaatccatcagtacgtgaatacacagtagccggcagatacggccgagccagccactttcaatgcaggcagtcaccgccacatatagtgaggttaatttagctgacaacgccccgagcaattaaacgtaggcagtcaaccaggtcatgactaatttttcgctatcagtgtattgatattaatgccgatcagcatagtagaactttatttaaaccccggctacattcaattcagctagccactgaaatagtaaatggggcaacctattgacagaattatcgtttgcagctggtagggcctcggctgagatttccgcggaagatggcccgggagataggttttagcccatccgcagagttcatagactcgatttaccgctgatgtatatatccgtcctttgatatcctaatccatccttagattctcagaatctgccagcatgactatcgaagtaatgtcccatgagccatcccctatcaaactcgcctccctcgcatccaccatcaacgaagcaattttgcaatactcacacgctgagtctgagtcagagagaatatcagctttaaaaagcatcgatgtgacctcccagaagcttgcacaatgcgcagtggaaccgagacggtctctgatggcgtttcacttccaaccccataaggttctttgcgtgaggctggccatcgagatgcgcctttttgataaccttccaacctccgctcctttcacggttgagcacctagcaaagcaagcaggaacagacttggaatttactagtcgcattgcccgcgccttaggagcattgaacatcttcgaggaggttggagaggatacattcaagcagaccgccttgtctcaagaatggaacgacaagttcatgcagtcatataccagacactcatgggataatgttttcagacccatgtcttcatacattgagttcttcaacaccacgggtttcgtgagcccctctgaccgactgaacacgcctttcgcatttgcgaagggggccaaaaatgtggattttttttctctgctacaacaagatcccaaagctgcaacaatatttaatgaagcgatgacaagcttcaaagaccccctaggtgacttatacaacttcagcagccttcaagtcgaagaggatggagtcgttctagttgatattggcggtggaaaaggccaaagcatccagagcatacaatcctcatatccaaacctcaaagggcgatatgtcctccaggatctaccagcggtgattgcagctggagatagggtgtgttcgcccgaagtcgaagtgcaaccttacaacttttttgaagaggtgcagcccatcaaaggtagatagacagagttatatttggacttgatatgatatttgcttatacctgttatttaggtgctgcggcatatctactcaagctcatattacatgactggcaagatgcagagtgcagaacgattctccgaaacttagctccggcaatgaggggttacaaatcgaagcttctcatttgcgatattgtcctgacagatactcggccagacacacaaaaggttctttatgacatcaacatgtttttcatggctggtaaagagcgcagtgtgaagcaatggcatgctctcatggaagggactggattccggattgaaagaattattgggctggataaccctgttcgcagtatcattgaggttgtgttagatgggtagtcattgtttttctacttttctgaatgaatgagaaaagggtcctttgtatatatactgcagatactgtctaatttttcttgtgccatggactgtgccttttaagcctaagaatattgtatagagtatactggcttaggatggaacctaagccagtatactctataaagaggaccacaatcccaccccactccatggtaaacctaccaataaagttcaagttgaagcctaatggtacttggactttccccggacacttaagcagctagaaacttaccacggtctagtagggtatctccgtaccaaaaatttggcgacccgcttagataggcagagctatatacgataggaagacggagctgcttaaagctagaccaaccaaggggtcctaaagggaagctttcttactaaggatactagtcgaaaacctgacgagtactgagaaagctagcttcgataatctctaagctgcgatacaatacgccctcgttcatatgatagacttcttcgaccccctcagacaactttacgccgagaccgatagttctaaggacgaaggccacagcgtaatgatcttccacgtgaagaaaggctgggcctacaccgacacgagaaaaccccctctagccaacttagtcgagccgatcatgttcctaagccgactcctctcctctgccgagtagaactactggccgaccgagctagaagtagcctacctagtcggggtactacaaaaattaaggcacctgctcctcgctgtgccagccgaccatagcgctacggtcaacatcgccgtaaacaccaatttacgctcagcggcgacagagaaccaaaatctccgtttggtcagggcagcccaatttatccagacattcagcttgaaggtctaccacagatccgaagcaacgaacaaagtggcggacgccctctccagactccggagcgaggacaacgatttagacagctttccgcagggcatcgatgctttcccggcaacaacccaggaaggcgaagaagaaccatcaagctccggaacaaacagtacggtcttcacggaactttctaacgagttgaaagaaaaaatccaatccgggtaccaagccgactccagatgggacaaagtcattcaaactctacaggaggaggaagcctccgcagatccgatatccaccaaaaactgccgtacagactagacgacaacgggttgttatatctcacacataacgacggaaccgaagccctctgtctcccaaaatccatgacaaaggacattttcagcttggttcacgaccacaaagcccgccaatgctatgacagctgctggcagagaatgaaggggttctggaattagggcctatctgagatcctgagctggttttgactcgttctaggctggggattctgttgcgcgggggcaagctgctgttgctgctgcttggcttggtactggttttggtaatgaccttgttgccaggtttgccgctgttgattttgccatcttggtggaggtaggtggagatgggtctggggttggctgggagcgaatggttacgcgtggcctgccgatgtggaggactgcttctcgacggtgatgtttggggttgcacgggtggcgttcattgggtctgtgtgctggtgtcgtctatgaagccgcgagtagagaggaagcggtccatctgaatgtccctttagacagcagccaacgcatcaacttgatcctgagtaattgtcccatccccaacaaggcgctgcagaatctcatggcaaaatctttggcagttattgacaacaagatcaaaggggcggttctccgccgctgcaatgcacagcgcgtcaagttcgtcgtcggtgagattaagcccagtggcgatttcaactgaggcttcaagtgaacgcgaggttgctgggtttatgttatccatcggctcgtaagactgagccttttttcagtatattggagtttgagaataagatataagtgcataccgtcgtcccgctcagcagggaagccttactcgcatgaaaaagggttccggtcgctgctggggcatcccagagaaagctgcacaaatattagaattagaattattcaatattgctccaagcttgagacttacagagcccaatgagccgtgtcctcggggaaccagcgggattgattgaagcacaacagagttgatgttcttgtcatgacaatctagcgagctttgtcttgttgagcagttaatcgcgtgatacgtgtaagacggaagattgttcagaagtttggtagagaagagacgcgtcaagaggaagaatggatggggacaacttgtaagtaggagggtcacgtagctgggactgactagagcttggagttgtttgtgtccatctgtccaaggctttgatatgtgccttcactgtcacaattattttgccaagttcgaattttgctggcctccaaagctatagtttgatattattaagatacaaaactattcctagttgatacaatttcctagagtgttgcagttttcaatccaaatacaatatgggccgagtttatgctttggcctttcatgattgggactcgttccttccctttcgggctcgcgagtcacttgctccttccctctcgagggaagtcgttccttccttgacagtaagcgagcaggctttgccatgggggtataaaatgtataaaattcccgccgtagctctgcgttctgttctcttttctttttcttctctacgtttagtatttcgttagaatgtactctttcttatcgaattgacctgatacgtaacatactccaagccttacagtacccgagattaatatgagctgatttggaaagaaaaatagcaaaagatgacaaaaacggactaagctttttatcaaattactggctctatatgcgttggttgattctcccctagaacatcttccttcattactgctatcctttatcctaaaacgaatatggtttcctcagctatagaacaatttcaaagcctctgggctgagagagcgctgcaacattaccgggatctctccatcaacttagacaagcgcccttataaactagccctcccctagggccacactggacaggatcgtggccacgggccatgaggactttgcccaataccatgagctgttcagacatgaaaacgctaagctggagtagtcgtgctgcgtggtgttttagtcagtttgtataatagtatgagcttagctaccagccaggcgattccgcttcgcccaagttcacccaaaggacagagtttttgtttgagatgtaactaagcgctcgttctctgagtctacgcatacattaacgctaattctaaattccatattattataagaagcgatacgtgcgactttctgatcgaaattcaatataaatccctcaggcccaaggacgtcaatgccagccgggagcttggcttcgagatcttggacgagataggcctcaattgtcagtttggctgttgcctgtggacctatgaagtagacgtccaactctatccactcgttcgatatatattgggattttatgccgctgaccgaaattggttttggcagcattgtgactagggtatctatcttttgagctaccctgagtcgataagagtcatcacgcatccggaacctaaataagctgtaatgcattgatcctaaagctactgtagccgtcgcatacctccaggcacgaaaagcgtatcctgggctatgggctttgacgcggttagactcatacaaggggagggagccgtcaaacaaagctggggctacttctaaggtcgtcccagcggccggcgacttacagccgtatagatttttatagagatcattaccagattcgaagctaaagtcacaattcaaacaggtaacagagagctgggggtggcaaagctgtgccgtcgcccgtaatatagccccggatcaacttcacgttccgggacgggaccctgcggcgcgtggtctggtttgcatgtgacttccttctgacgttaaatagcaactactacttctccttctcctaagaatcaacatcctcttcatttaacaaacttcaactcacataatcatgcttgcccgtcttaaaaacatattcaccccctccaccaatccttccgtacttcttgttgttggcaagtttggtgctagaatccatgttcttcatcttatacccgaggacggcaccatcgaacgcttttgcctcgtaatgccatcttcgtttactaccttccgctaccgtggagccagagagctatcgcgcgagcagatcggcacagtcacgcttgacgttggagatggtgtgattggtaataccttcctcgacgacgttaagacacgaatctacaagctacagaatgattccctaagctcgagcccggcgcagctacagacaggcagtactgaggtaactcagctcgtgcaagacgtccttcggcccgtagcactcgatgcgattcatgaaagagaggggcgagatcgctctatgcgcgcgacagagacgtaccctgtttttattatttacatcacacgcagcccagggaggagttttcttgagatgacaagctatccttaatgagattccatcatgaaagagaggcgagatcgctctataagcgcgacacagacttaccctgtttttgttgtttacatcatacgcccgagcgcagggagactgactgagctgacaagctatccttaatgagattccaccagttcttttgctcaatatatgaatagtagttgtagtgatttgaaataacattatatgcatcacagcaatatattggcacaatttttattttgtatgtggcttgcttttttacaattctgtatgaatagaagtagttgagcatgtaggtagtgcagctagtcaatagagtaatagcatgcaatacttagtctctatatcaataaccattgaagccttgacaatgaatagttctcgtactcaatgaactatgaggcagaactagtcttttgtgaaacatctgataggccggtttcaaaagtccatttgcagttattgtcgtatccctgcgcgattctctcaacatcgacgacagcatcccacgccgccaacgtcctcctatatcgttcctctccatcctcgacattgacagcgtccaggtcttcctggcgcccagcatcgcactcgcagcgcaaaacagacctcagcacgtctagcagttccctcctccacccaggttgatggcccccggacagccgtgccgcgacgtactcatgatgttggccatctcccagtccaggaaacccgtcaccgcgagtgtgcacgggtccacgaggatgttccggtcagacaagtccccatgcgagaggacaggacggtcccaatcacctgggccggtggtgtcacgctgtactcgctcaagggcgactgcacgttccgcgtccgggtcagaggcctgcagcgcgcggacgcgcgagtcatcccactctgagcgggaggcgcaacatacatacgtctctgtgccaaattcggagaagaggacgtacggctgccgcgtaggccggccgtagtaagaaaagtggtgcgtacgcatacgcacgaggagacggcagagctccgccttgatggtctggcgctgtagaagggtgagagagggccagagctcgactagcggcgtgcctggctggcgaatgagaacgacgccctgttggatgcggttgggcgtcaaggcgttggaggttattatcggaatcgtgacgacacaaatgacgcgtgggacacagaggcccaagatggaatgggcgagcgcggtcatcttgccttcgccatcgtcagcgcccagtttgaggatggtagagggagaatgaataaaaaactgccgtccaatatttagaatagtcggcgctgagaacagagggaggctggggagaaaggcccagttctcccgaggaagctgctctggttcctgagagctctcgccatctagtgtcattttgagcggcgatgcgtggggagaagtccagagtatcaggcaatattaagggtttacttagttaagtaacctggtgctaaagtgcgatgtcctctaagataattgattgattgcggagcgagcgaagcaagtataaatcacaacgtcctatgtacgtacgtatcacgtggctaaattacttatctaggcccttctacgcatcacaccagactaataatgaagacaagagttctttctcggttgtagcatttgtcttgtatatattcttatacaatagcgacagtcattcattcacgactatctccagccaacagattgatttcttgccgtacgaagcaatcccacgaggaattgactgtctagcaatattcaacccaggcatcgaggttcatgttcttgatgacagtcgagaacttgccggcgttggctgcgttgcaggctgatgtcttcaacgtagaggagagaacggctctagctcggagcttgtggtgaccgtgtccgtgcccgtgtcggtgttttttctccttagtggcatcggtgctagcctcttcctcgtcgtcttcgcgttcgtcatcttcatcgtcttcgtcgtcgtcttcgtcatcatcgttagtgtccgcatcagtgctgctagtattggtgtcatcggcggctgtgctggttgcagcggcagcggcagccgaggtagaagaaggtatgacagcaacagtggctgttgcagaggcagcggcagctgaggtagaagaagggatgacagcgatagtggcagtggcagtggcggtagacttgctatcagtggaagtcttggtggcagtatcagaagtatcgtcagagccgtccgactcaatagtctcgtcggaatattcaatatggaaaacagactcatatcttatcaatagatgaattgccgcaggactgctcgttgtatgatgctatcctaagccgcctactattcatgttcgtcgacgtgatttgctgttttgcagatgatcttggaggccttgatgccgtacgtgatatcttatcagtatgggtgcgtatcggatcggggtcttcacgctacaagcttgtttatcatctaggaaagtggctatatcggcaagtgagatcaaggcaggtacaccgtttatattctcatattataacggcgcagcaccccacagagtccaatcaggtctgttatctaaaattgttctcattaagctaaaaattatactaggatctttatagcatacggtaggcttagacctgacagcgagagtgaaccatttgtctagtaagtaaggtaggacacaggttcggaaggctacgaaatctagaaaagcacagatcataagagagaggttgaagagatgtgcgactagaactatattagcgtggatccctgaatcatcacgccaactcgggccacacgcaacaaaatgtcccctaggttggcaagtattgcgccttagtatctgagaacataagaaccataagctgtactaccctaatataacttagttagatcttatattaaagtggattcagaatggaaaatcacctcagaggcactgggtaattagctgtgaaatttctggttccacttgcaataataaaggactatcccggtcagtgaacgacctctctagggctacatagcagctatagagaatgggtataatatataatcttatttggtttcctccatttcatttgcagcacattaaaagatctttgccgctccctagtaatatgggtattgaatattaaggttaagttctcccaggtcttgtggcagtaagcttgatgggggaagaagatgatactattatgacccctctggtgggggtgccatggctaaactatgactaagcaggctaggcctgtgacaggtcttatatggaaattgagcgcggagtgagactagtaagctcacctcagaaggtgaccattttattataactttaggaggaaactggttagaacttatcgttaaagtacctaggtaggcgcccttgattataaatcgctggactcgttataggtatctgtacagtcaaggtaccagtaaaggaaaccttcgataactctgagagttatattcttcagctagtattaagggtctagtgggataaggcgttagataaaactatattattagtaatagctgggagaaaatctaataaagcaagattaactaggataaacctactttttgaagttgcgatctatatatcctgtcacgattggcacttgcgggactcgtactttcccgtttgggattgtaccgttggtcgtttgcgcaggcagtcgcaccttccttctgggggaaacgagaatagggctttgtccctaaaggggtataaaagcctatttgttgttttcacgtttgtttcttttcttttccttttccatacttgatattcgattagaaatgcacttcttttgttaaaaggaatctggcacgcaannnnnnnnnnnnnnnnnnnnnnnnnnnnnnnnnnnnnntctttccttcccgttcgaaggaactcatttgcgcagacagtcgtaccttccttctgggagaagcgaggatagggctttgtccccgaagggatataaagacccatttgttgttttgcgtttgttttcttttcttttctttcttcatacttgatattcggttagcaatgcacttcttctgctagaaataacctggcacgtaacatatcctacggatttcagtatagaatcggtaaaatccgcgttaacttccggatcttcttattagatgaataacatccaatcggttttattaagcttagcttcacttttcttcggcattttgccggtagtatagttcaatgttattagaaagtagaacggccacgccgaagatatggaattgtttagggatgatatctgaacgaggacttagactgcctttatatcttttatccataatgtacgcgctgagggcgttgatgtatgatgaatacttactcctgtaagggcgctaaacctaatagtattatattcaatgctctaacgtgagcgctaggtgaaaggaccacgatttcccctcgaaagaccacacacaaatgttgtcttttcgccgtcaccccgacttactccatactatacagtggagtacccgtgacgtgcatatggtgaacctcggaaccgcggtttaaccgccgttatctcttatcgtactcccctatcgacaatctgtcacgtgtggccttaatccaggtggcctgaaagtaaccgttacacttccaactatctacgctcagcgatgccaggggatgagttgtcagaggatcacctgtatgcccggaatggccaggatgaacatgaagcccaatccctcctgtctgcttcaagcgaggagcatgacctagctctccatccggagcctcttccgtcgccgatcccctcacataacgcgacaagtagcatatcccactccgcgatttctcaacctgcaaccgacggaaagcgccgtacaccccgtaccatgaaccgagttcgattcgacctggacgaagaacctgaaaacaatcgcatttccattgagcgtactctcagcccggacgacagtccagatgacacactatggctggaggacgaggactatgaacttggaaaccgaggcccagggacacaccacagtggacaatcaattcctcttctcacaaatatcgaagcgcctagtgtgacacttgcaacgtcggacgatttcttccccgaagatcatctcgaaaatgcgcggccgcggagtgggatgaaaatggcgttcatgaacatggccaacagcattatcggcgctgggattattgggcaaccttacgcgctccgtcaagcaggcatggcgatgggaattgtgctgctgactgccttgaccgtcacagtggactggactattcgattgattgtggtcaactctaaattgagtggggcggattcctttcaggcaactatgcagcattgcttcgggaagagtggtctcatcgcgatctcagttgcacagtgggcatttgcattcggtggcatggtcgcattttgcattattgttggcgataccattccacacgttctaggcgctttatttccgtctcttaaggatatggccttcctctggcttttcacagaccgcagggcggttatcgttattttcgttttggtagtttcatacccattgtccttgtatagagacattgctaaggtcagctcgttccttccttactatttatcatagactaacagtcagatagctggcaaaagcatccgccttggcatttgttagcatgatagtcattgtcgtcacagtcatcacccagggctttcgggtcccgcctgaatcgcgtggagagatcaaaagccacctcgtattcaacactggcttttttcaggctgtcggggtcatttcttttggtaagttttagctgccctgtcaatacttggaaagcttctaacaatttccagctttcgtttgtcgtatgttcctttttatcctactgatatcccaaccactaatttccacagaccacaacagtcttctgatctatggctcactgaaaaagccgacactcgaccgtttcgcccgagtcacacattactcgacaggaatatctctggtgatgtgtctagcaatgggtatcgcagggtttctgtcgttcgggtctaaaacccagggcaacgttctgaacaacttcccatcagacaatatcgttgtcaatatcgcacgattgtacaatcttcccattgatattgatatagagattcttgactgacttctattagctgctttggcttgaacatgttgaccacgctaccgctcgaggcgttcgtctgccgttccgtcatgacaacctactatttccccgacgaaccacacaacacggttcggcatattatcttcacaacggcgctggtggtgacttcgatggtgttgtccttgataacctgcgatctgggaagtgtatttgagctcattggcgcgactagtgctgctgctctggcttatatattccctcctctctgttacatcaagcttagcagtgctacgcggcgagagaagatcccagcatacctatgtatttgttttggtgtgcttgtgatgggtgtcagtgtagtgcaggcggtcatcaagatcattcgaagtaagtgtgtcccggaagatggttgcaattggacccagttgatagctatttggtcgcatcctccgcaaatatactaacattgaaatttgcagatgatggcgaggcccatagttgcagtgcacgttagagggaagggattcctcaaggactttccacagatagcggcgacttgtactctcggtgtgctcgaaaagcctcttggagccgtgttgctatgtatatatgtatccattttgaacaaatagctgtttcctatcataccctacaacattctccttcacaaatggctacgtgccgtttttatgtagaaatggattgcgacgtctcaagatagctagcaggtagtttgatggatactgtgtgcccaggtgagcagtatgtatatactgtgcagttagactaagtacggtgaagtatattctaggcacgtgcactttgtgatttaggtatcgcaatccgtctgcttcgtttctcattttctactactccgctcactctctacatccccaaacaccacgatgattattaatgtcattctaacgtatatctataggactttactatgacgtgtatacgtgactcgcacgtggccatctcgcacgtggccatgccagatcctaaggccaaaagacttccacagaaggtgcgatggacaatccgcgcaacatcaagaacacactatgcagcctcgttgctacccaaaggagcgataccctcatatgtttgtgcgttcacgcatgcgtctttgatccaactggctctgatcgttcctttatttacctccctgccgtcttctctctttcttccttctacaaccactctctccctgtttttctcttcacttcttctctcgtctggagcggctctcacagttctcatctcgggtgctttgctcaaatctgcttgtccgtctctgtttctttcgctccacagagtcccaagtcctcggagtatccccattggtcgcctgtcccttagggaccttgcttgtgcttctcaagcttcattttatctttgtccttctttcgaagcctccaaggttgctttgacctgcagggacgttctctctgggatacaccatcgcccacgctttaaccttccctcccactcactcctctcttaccttcgcgctttggccaaccgaggcatagtactaagccggtaacacgttgacaacgacgtgtcgcataagtgcatctaatatcctcattaccgttgttcacatttcacccgccacgggaagtgcaccggcaagatgagcgagtccgcggagcagctccgccagatgcaactgcttcaaatggtaatatctagcctctcactcctatctagcttccctaactgactgaatcaataggcggacctaggaaccgctcggcgtgaaatgatttccacagacgagatcaggaaacaggctcgtgtccacattgccgatatcgaatccaagcgacggcttgatcagagagatgaagctcaattgagcaaatgggcaagtaagtactgagaaagaaacgcccttgagcccctctaggattttactaatctttgtcgcagatttgcatgctgagatcggagatactagtggaatggaggaactcgatgacatagaatgcggccagtcccaccgagctaatttgcacgcgatgttgcaccccagtggaggtcagccgcaaacctacgcaaaccacctttacccaactccatctgcaggtcgcggtggtggtgttatgggaaagagaggacgaggtggttttgctcctctccccaggggacctactaatcttcccccaatccctccaaggtaagaaattgatttaccccgacatttcagacatccaaattgacggtgaataactcgcagaccctcctttcatggaaatgttacacttccaggactcccaggaccgcgcggtcgctcggctacaatgtcggccagcattcatttggaccctgcgttaaactgcaacaacgatgacagcgatgctcgagatcgaggaaggggacgtgggcgaggcagaggcagaggaaggggcaacgcccaagaacaggttcacagtacgttttgatcacgggtacagaaatagaacacagctaacaatattcttagtgccgccttccgccatcaggcctcatcgggcatctccagcgtaagtgatccggcttctttctcttggtgagattaagatgctaacttcttggccagcgtcaacttcgccactaaaatctctgagcccggggacttcatgtccttatttcagtcccgccgggcaactgaaacgtacaagaagcctaccgatacaatcgtctctgctccaattccgaagactacatcttcgcaggaatccattccacccaatgtgccaagggtgaaaatgcctccgagcgatacacccaagaagaaaaaggcgagcattcttccagttgcgaagcctgcatcatcgccagtggcaacatcgacaacgccatctcgggttgttcctattgagacgactacatcgttccaaccctccacggcccaggctactactggaaccaagaaatctcagccacatattggaccctatgaggtggagacgccctcacggtcagcccgtgttgttcctcttgagaggaccgcatccttcaaaacccgcaaggcccagcctgatacacccaaatcttctcagccacgtaataaactccctccagtggaagaacccaccccacccccaccccattcggtttctgtttctgtcaaacaaggcggcaagcccaaaaaggcgaaacacatggtgacggattctcagcctcttccagcaatggtcgcaactgccacggataaaattcaatggaaggttttgcctggcgaggagccacgaaagaagagcacggctcctccaagcaagacggcagtctcattggaaaactctatgcccctcgctgaggccaagaagacacccgtcaccaaggtcactcaactcaaagacagcaagcagaatgttcagatggaggaaaccaagcataaaccccaatctcatgatcttcttagcgatgacactccggttatgacaacccctcgccatttcaatacagtggccatcaagccacccgtcgtcaaggtcactcgactcaaagacagcaagcagaatgttcagatggaggaaaccaagcataaaccccaatatcatgatcttcttagcgacgatgacgccccggtcaattcaacaatgataacccctcaccatatgaacacaatggccgtccacagtccaggtgctgcagaattggcaggtctgaagtttgccgagaaggtcggagagtcggtgccatccaagagcattgacggagtcattgcccctaaaacaacgatcaatgattcaagtcgagaacttgacggcttcggtctatatggtccgaaaattattgaagaacttcgcgacattcgcaaacacattcgttcgccccaagagttggctactgcacatgatatcgaacgcatactggaatctaaattgcttcagttgattcctgaagcacctccaccgcctacagcacctgcatcatcggatatagaaggtcggctggggaatctgcttgcacttgtggaatatctttccgcatcgcagcaaggaactaacgctgttgaaatttcttcgactgcccggcgcgatattactccatttgaggggcaccgatcgccgcctcccccttcgtctagttcaaactcacccccgtctgccgataaacgcgcgcgcaaggtacatgtgcccggcctctcgccaaccaatagtgagagttccgacgtaatttcacagttcgagactcttcaggtttcggacaaactcgccgcgcccctccaaccgcagcgtgtggtcccagtcccagctcttcgtccgctgagaattccgaagaaggctactacatccgatatgtccgttcaggctactcctgctctgggatcacgtgcaaaggaatcaacgaaaaagccacagactctgaacgattcgatctttgcaggatctgtaccccttgtcactcccaatgctaacgttattgaacctaatgcggtgcgttcccagaccactggtcgggtgttgagcgcaaaccatccaaacattcccaagcaccaggatttccaggcaacgggcgctcgtacaatcggccctgcgccatacaaaccccgcgtgattggacctgcaccctctgcctatgagccaaccacgttgcgcgatgtgccaacagcccacattcgtactgtttccgttcagcatgctaacactgagaatcggccctccttggatgttgcaaaccgtgcttcgacctccatgggttacttcaatggcccagcttcccagcaagctccgggtgaactgttctccatgcctgaccctgcgacgattctccagcccaaagcgaaggcggctggtttcttcacttccaaccaatctcgccgctaactagttaatggcttctgttttccagagtctgagtttcagtggatttcttcttctactagcctcagccagctctgatcatctatggtctctacttcagtttcattttcgtcttttctatggccttgttgagctttgagatctttgctttccctggctgaatggttcctatttcagttgttcaattgttcaaaagcgaaaggtcaatgatcgtttaacgggtcttgcgtgattatcagatagttgaagctctaatcaactaattgttgtttttttcatcacttgatgtgaatgtaggtagttcattagggatatgagccgttgagtcagacatgcaataatgcagaggaagaaagtaaagtgctgtaaacatgacctatcactacgtaggtactctatcatcatacagcgcaaaattacctcgctacaaagaaaagaaaaagcaaacacgtttcagattaaacatccgcctagactattgcacccaacccgaaataaagaagacctacttccgaggtggacaagttcggtatatccgatctgcattagtcggggaacatgcctcccgttccggtcatttctaggacttttgcactcgaacagacctgtcacagtactttctttttcttctttcttttctttttgatgcactgctcctcaatgcagacacagcggtcaggaacggaacccggaagttcaatcggggaagacaaagcgacatccggtgcaaagtacataatggccaaagtacataatggccaaagtacgtaacggtatatattgatatcgacatgtagacttgacgaggtgtgatttgcacggtctttaaagaactagcctttgctatttgtgatatgttgaacttgtagtatggctctatagcatgacgtatcaaaatcctagggttgattctataatggcatatagatggtcttgtggagatctagttataccctgtcaccgaattatcccatctagatatcttaactcaattggattcagtcaggcacggctctgatgggttggatataagattacttgccttcgaagctatatgatccacgcctatacggctgctgtacatcttggccatatgatcttttccaagtagggatgttgatcatgattccctagagagattacgttagaaaatatcatcaaattttactagagcctcttacttgtgtaactgtcgagtctgtggtatgccctcgctctcgatgaaccctggagtatagaaaaacagaggccagagcgaagaagacgagactgagaccggcagcaatagtgtttgctgctcgaaaaccggtccaggtaagaccaatcaaggaagtcatctttactcgaatagtatccatgagcagtgtagtttgacaatgaagagcgatattatgtctcgataaacgtggattcattcttctttaaatatactcccatcatgatatgtgacaatcaccttcgcacaagtaacaagtcagtagccctagtctactactacccatctcggacagtgcaggatatcaatatcctccaggcaccacaaaagcaagaagccggagcatagacgccgatcagtcaactcgtggcctctaccgatcatcactcggagtgtgtaatgcaaagaagaaaagaaaaacaacattaataaaaacaaattgcaaaaagcaaagaaagtaaaaaaaagcaaaaataccaaatcgcgccgcatccttgagaaattatgccggctagaattccaccgtcctgcaggcaccgccaagaaaatcgagaactgttcattgggccttagaccttgtgtttcctgagctgatgcaccaatccgttaatgccagcgtaccgacaacgcgggctatgggaactgctatccggtgccgcgggctggcccttacccatgcacatatatatgcataggggaacacccgggtgtttcttgtggttcgtgtctatcagggtctagatacttgctgtcatctgcgattggttctggattcgttcgggactttcccgctagccttcgaagcacggcgggagtagggacagaaggtcccggtagacgttctggttctgcttgcctttggcatcaggcttagggccagattttccaatccctgttcgtaattttgtatcgaaatgatgtcaattttgttatgattggtatttctgcggatcaacataagcctgtggtctaagcctgccattgtgttcctgaagtcctgcatgctccagattcggtttaggataacaaaatagaatatgctaatgtgaaggaatgtatcgataatcagtatccccgtccggtttccccgaataggatcctgtgggtccatttgcttcgaagactccggaaggcctgtcatacttccccgccgtgataaccatattatggcgccgtaggccagaggtgaagctaaaacgaaatttcgatgaaataggaacgcttgtagttgaaattgcgcattgatgcactctctcgggtccgaaagacaaatcagatcatgttcattactgggctagtgggcgaggcccagaagaaggcccagggtcagcacctgagactcgaggccgttttgggtcgtttggacccagtgccgggaccccttgatgtgcgccagctgttccatcggcattggtgacgtccactaatggaggccgttttccgttgaggttattctggggtggcatactgcctcggttcatcatggcagggttggaaacgttcctttggtcaaggttgggccgggtcaatggtcgatacgatgagacagaagggcctctgccgaccggactgctaaccccaccaccaggagcaccgattctgcgctgcagatccgttgcgggattgacaaaatcgcgtgttgcattatttttattaatggtgggtgctggggaggcgctcgacagcatcggcctaggaataggaatgcttttgctgtggtctacaccagcggttttgcggatggagggactctcagcatgtggatcgaattgaggtacgcccgacgggacggagtttggattttcacggagaaggtccactgctcttgcagaaaagaaacccgttgacggtgtgccttgcggtggtgggttcatgtcctcggttttctgaaagccgccggggccggtttccttttgagtcggaggctggacgatgtttttgtgtggaggatgctgaccaactggttgctgtggtgggactgatggtctagggttcgcaagattttgagcaggaccttgagcggccattggtcgaccttgtaccgcagctggagacggcatagtagattggttctgtcgcacatttgagggattaggtcgtcctgcttggcccgcgccgttccatcgctctggttttgatggtgttacaacagcggggttaaatcctgctcgaacaggcggtcctcgctgaggcgctggaccgttcgttggcacggtacgctgctgttctcgaagaatctctgtgtctattacgatctcatcaggattgcccatatcggtatcagctaccccgaaatcggcttcatcaaagaggtcacctaaaaatcattagccggagttcaaccttatgtattctaatacatactgccaaactctccatctccatcaaaagaaacattattcccagaattatttcctctcgcttgatgtggcggaccagggaggggtagatcatcctcttcgggtacttgcttgggtggaggcagcggtttcttaagtggcgcgaagtccgggtgacggtggagattttcaacgtcccatcgtccctattttgatagtcagctggcacatcgcaagttggaggacatcggggaccttacaggcgctgccttgactttggtcaccttggccacataatctttgtcatagatacagttacctagcacgttgccaaagttcctcaatgcacgtttcaaagcatctgttgtgccttctttcttggccttctcaaacgctgcggccttgcctttgcagttctcgatatgtccgtagccaatatcctagaagagggctggagttagcacaaggcccacgagaattcatatcacgaatatgttcctttacctcatgaaatgttccatctctcaaggtcactctcatgatgactgaaagtcccaggctgatcttgcctgtgttctgattttcctcaacctgataagcgttagtcaatccctatgtgatgtagttgataaacataagatcaacgcacaaaatcaatctgaatcgtctgaatcgaactggaccagccattgaatccaaacacttcattcgcgagattaatgcatttgtccgcggagagatagtgcactttttgccccgctgcaccaggtcgcgcagagatgtattcgggtcccaatttcttatcaagacgcgcttgtagtgttgcaatttcctgtgcggtgtattcactgatgcggcgttggggttcctcaaatgggtttgctttagcggctcctgtagcgttcggcatcattatagatcctgcattaccccgatgctggtcaccaacgctgagattatcactatcagtgctcggttccatggggtatagtatttcgggtccggggtattggtctcacgctggcatgttttgttgtgaatgagtgtcgagtttgatattagagatgtactggcgtgtcgggcgcgttgtcttgaggcaccaggacgcggctcatcgcgatatcacatgatgataacgcgataagataaagattagagcttcagtaaacaaaacactgataattgatattaaggatagttggagattattaggtatgtggttcacatatggaagctaccattcggggtttcatcatttctcattctttgcaaaagctatctatcccttcggatgaggaagggtatgccataaatcattggatgacgagactggcactgggcacaagtcctagttccttcaaagtctcgccgaaaaactcattatcaaatatcttcttggggaaagtctgcacgaagctctggacctcgatcccatcctgttccctcaatgcggccgcaacctcaaacaacgtggtgtcgacgggcaatgtcttcatgacgttacccttggatgactggaatcgcagtcgagtttcggtataggcagaggcaggtttagacgtagtgggaccggaggaagtgggtgctggagcggcagcaggctggggaggaggagccacaccggcacgctcagctcgctgcttctcggccttcaatcgacgctcctccttgtcggcctcgattttcgccttgatacgttttttggcatcgatttcatcctgcttctccttcttcttcttggctgcctccttcaactgttgcttccgctcgagttcctccttagcatcttgactttccttggtgctcttccttcggatttcctaataataaaagtgagcaaaatacctcaatcgaccaaaatcaggaatacacacctcattcttcttcttgtcaatcttgtcctggtccgagagccctgcgcgcttcgccgcaagcttctcccgcagctctgtcagtctctgcttcttctgctcctctgtcaagggagcaatctcctccgtagactcagcaaaatcaacatgtcccgactttgatgcgtggaactcggcctgtgactggcctcggaacttcttgccacactcgttgcatactaagctgcgtggttgttcgcctggttgaagcgcagggttctcttcgtcttgtgctgctttcgtttgtgccttaatctcctccaatgacttgtcttggttgtcctcaagccactgtagtgcaccttgcactgttaagtcagttagcagatacccaactatagatactggggaaacaaaaacttacagccaccagtcttcgtcactgcgagctgggcgcgctccttgtcaaagcccatttcaatgagctgatccaagtccgatgccatgacggctgttgggacgtgataaagatgtaaatgtaaatgtaggacgcgctcgaaaaatgagcgcaatttggcaagattgaatcagataggtggttcagatgtgagttaggtcgcgagaacagagtgggtgacgtatcagaaaggcggcgagcgataaggcccacttaccttccccgggtttctatggcatcaagttcttcttgatggcgtgttttgagggatagttcgatacttgtacgccattgaaagggtgataatgccaatttcatgtttctatgatattttcgacttgtactacctatgcacacgtgtcgtagttatctatttaaatttaggtggctgtgtggcttatagagccgaataaacatgcaacttgaatatagtgttgtgcaagatgtatgtatttggcgaaaaccttcaagtaacatataaaatgtaaaatcaggctaaacggaatacgaacatgtatatatagggagggactagcatcatataaaccgaaagatatatctgctaaggatgcgtgtgctacgagataactgcattgaagacattttatatattactatatttcagcctccgagacagaagatatagactacaatatgttagcaagtgacgtctattaacatacgaggtcgaagccagcgccaagggatatgatcgcatacctcaatagcatagctccatgcatggcaaccagggaaataaggcatatatacaggctgatcccagtagaaagttcagtgaccaatgagcaaccaatatgacgaaatatatacaatttaaacacaagtgggatttgaccccactgcaagtatcatatgcgggtgaagatgtccatctgaggatgcaaggatataagagcatattagaaaagagtggtcgaactagatatatacttctcatagccaatatgccaatagaataattaaacacgaagaaggaacttgcaatgtggttatagcctactccgtagagcttgtcaatagtgacatcacctgactgtttgctgtttgctgactcatctaatttccccgtgcctaggtggacagtaatcaaactcctgaggcatcttagacctgataactccctaacgcctttattcccaatcggaacctaatcgcgtgcaatcatccacgcccttgtcatctttgttcccttctcccacctctgtcaccccgaccacgtgcatcatgaccatccaaatcgagccctccgagttgggcttcaagcgtgagtgctagaccccgaacctgtagacctgcctagatcacatctcatcggttgataacaggtcccttcaatcatgaagtatgccaggttctccgcctgagcaacccgaatgaggaatctgtggtcttcaaggtatgtgtgacaaaccccctcccttgatctttgtcgcagtactaacatgtgtcctcggcgcactaggtcaaaaccaccgctcctaagcagtatgtcccgacgattgtctgcgcaatgcctatactcgagtttttttatctgatcatattgtagttactgtgtgcgacctaactccggccacatcgaacctggcaaaactgtcgaagtccaaggttagtcgataagcgagtacgcctgaattttgcggcgggctaatattatccacagtgttgcttcaggctatgaaagaggaccctgctccggatgccaagtgcaaggataagttcctagtgcaggccgtcccggtctcacgtggattggaggatgccagcgttggccagattgtatgtccagagtccagcatggagaacacgaagatcaataactaatattacatttagttcgaccaaactcccaagggcgacgtggttgagcgcaagattcgagttgtctacctagcaacagatgccacttcagccaacgaatcggtattctccccagcaatcacttctttatacacatagtctaactttcaccaggtgcatgatgaggaacctccatcgtacatttctcctgccggcgcaaatttccagaccccggcccccaagaagattgactccgctgaaccgtccccaattcctgctcccaatttctccgagaagaagtcccagtctccccagcgcgagccgcaatctgctatttcaactgccaggtctgccgtgggaagtgctattccctcaaccgacgaactcaagtcccagctgtccgaagccaacgcacagatccaacgactgaaagaccgacttgcggatcaaggactgcggcagcggaagaccggcggagaggctaccggtaaagctgtgcctgctaccatgcagcagtcacatgcgccaacggcgagtggagtttccatccaggctgtggcatctctctgtctgctcagcttcttgatcgcatacttcttcttctagtctggtcttctgtttctcgctttctcgcggtctatctggcttcattgcacctactctccgcgtactaaatgcctcccgtctaacgtcgccgacgcccgtcccaaattcccatctactttttgtctcttgaagagagcatgccgttttctatctgttctagcatcagcctttttatgcgtttgctttaaattcttctgccccagtatcaatactctactttcatgttgtctctctggacttcttcccttgaggccggacatatgtctgtctcatcctctttgccgttgctttcctttgttctttaccattcctgtcttgtctaatatcattttatgataaaacggacccagcctttcgattcgttcgccttgtttcataacccattctcgagctcgggataatacatgtgattgctactagagctaactccatgtcgtatgcagttcgggacgttgtctcccttcttcggtaattggttgattgaagacattcggtcctgtctttgcgcattaaatggtcttgttgacacaggcaccggacatcatctcaactgagcgtaaatctaccgagactgatgcttcgtgtttcctacaattatgaagcctgataaaagtcacaaaatgacagcctatttgattgtaaacaaatatatctaacaagtacaagtactccacccagtaatgtatgtaactgaacacctgaaaatccaaaaccaaacgttatactcaaaaagcagaacaagatctaacattgaatctcactctccttccagccttcaccctcctcgcccgccggacccgccgactcagccgagatgccctcaccaccacgtccattccattgcttagacgcagcagaatcaccaccgcgcttcgtcccaccgccaacaatccgtccaccctgttcgcgcttcacacgacaccacggaccgacatccttatccaggatgaaagtgtaaataacccaaacccagctccggtggcaaggtagcggttcatagaactccctcgcaatctcatgcagcttatgcaatcgagtccaagggatagcagggaaatcgtggtgctcgttatgcaagccgacattgtaagtgaggatattgagcgggccgtagtacgagtatgtctccgggggaggcagagagtcgagcgggtgcgggaccttcggcttctcgttctttttcagctcggtcagggactctgtaccgccgcccttcacgttcgagaagaaatagtgctccgcgatgaagtggcctgcgcaggggtgcagggatccggcgaggaatgagctcaacacgaagtatagcactggctggatggagccgcatagtttgcttagggcgtagtcgaagcttatttggatgcctaggttcaggaggtggatgtaggtgaagggtgggctgtagatgaacattgggcgcacggcgtagaagaggatctggaaggtgcagaagaatgttttgcccaggagggagtttaggaagaaggcttccactgctgtggggaggtcggtatcgagacctgttacgccgagggatttgtggtgtgtcaggtggtagggctgttagtggtgctgtgtcagttcattgtctgcgttggggcccagctagtttccggcatgtggaagagtatacgtactctgaatgctgcgctgtacggcagtccgatggggaggtttgcgaagatagcgagcaagcggttggcgaaagccgaccggaatgccaggttgtgtgagatctcatggatggcgaggaacaggttctggttgcaagttgcaccgatcacgtatgccgtgaccaggaaccgccaatcgagcattgaggtgctgcggaggagataggcacaggtgagttgtagggacacgacgccgaggacgacccatttggtaagaggctcgggaccacatagtttggtgacctataggtacatgatatcatgaatcagcattgcaattgcacttgttgagactgttcctcgcccaggaaaggtggccaggtgtatgtaggagctccgcagacctccgcatggagtcttcacccagctctcatatcaccccgagggccctcaaaacaggatcacatacctccggatgggctttaataattgcctgtcttcttgagcggtgcggttcttccgtgtatgtccagaagaaatggtcctcgaccaaagcttcgggtgcctgtattctggtagactctggttgtgttttgtcggatgccttggctgccttggttgccgacacgcggagttgcggcgaagttgtttcaacgaccgcagacatgatggaaattggtgtgtgtcgaagtttaggccatgggagatataagaggtctcaaaaaagtcggaagacagttgttccacgtggggcgacgcgatacttgatggcttgaggcttggcaggatcggcacttgtcagggcttttggtctccaatctattcaagacattactaatgagatggatctttgaagaacgctttttatttacttatgtctatgaaatacatcagtagtcgtcaccacggctaataacttccttcacgttcgggcgcaatacaatcgtctaaacaagtcagtaaacagtccgagtggagaaattcccaaaatagaaacatacatgttcatattgggcagtgtatgagcccttgatatcgcaaagaggagggtaatcctgcacaattccagaagaaaccaggttgttcaactatattcgtcagcttcggtgtctcgcattgaacttcatcgtcaacttacgcccaaaaggtacttgtcctgacccaggcggtcgatgtaccggcgacagaagggaagggtgccaaagttcttgttgatcaaatttaacaagttcttagcggaggtaagacgcaagggaacgttaggagcgtcggaggcgagagcgtagtgcgaggtttccatctgaggccatgttagccttggttctcgacctaggacctacagtataaacttacttcctctcgcacgtaacctttaccggtactaccgaaagtctcaatggcgaaaacttcaccctcttccatcttggtctgatcggtgctcttgacgattggtacactcttgccaccgtggatgacgtgctggtcaatgttgtgaccgtttaagttgcggatacacttgacagggtgcatggtgccattgagctcaacttcgtaactttccatagcttcttggatggcggcaccgatatcactcatacggacgtcaattcccgcttcctagaaacccgtcagctctgcctgagacgaagaagagaaggaaaacttacccgaataccggtgttggtggcgtccttcacggcagcgagaagaggatcgtacactgggtcaaaagtcatagtgaaagcactgtccacaatgcggccgttaagctgcgcaccgaagtcgaccttcatcacgtctccctggttcaggaccatcttgttgcccgcattcggggtataatgcgcagcgcaatggttgatgctcaaaccacaagggaagcccataccacccttgatgttatcaccttcctccagacctgggtgacctgtcagggcgcgcaccgaatcctcgatgccctccgcgatctcagtcaaagtctgaccgggcttgatgttcttctgcgcatactggcggacttgacggtgaacctcggcaccctggcggtactcctgcaggaagtcattattcatgcgatcgaggtatcgtttttcttcgttggtagtacggtaggcattgtcgtttaggtattcgacgatctcgccctcggggtattggccgttggggaagaggttagacacaggaacacgcggtggctcgctctggaccttggcaccacccttcttcttgggcttcctcttgggcttcttcttcttcttctttttgtcggctagaggtgaccccgccgttagtcccggtcgacttctgtggggtggggtggggttctggaagcgcggtcacggaaataaacttcaacaaaactcacccccagcagcttcagtctctgcggcaccctcgccgtcttgggcgtcgtccgagtcctcctccgcttcggcgggaacctgatctgccgtgcgggcggcctggacgttcactggtctctgatcagtcacacatgagagaagtaaacagaaaattcgaggatcttacggtctaactgatccaacttctccgtagtctgagctgccatcttgaatgtggcaattgaacaagtcgtatgttcaaaggcaagaggggaatgtcgggtgtcggggaaagagttttgctgataagataagaagaggcttggagatttccttggcggcggatggatgttgctgcctgacatgcctgttgtgttgtacacttcaacacgtctaccatcatgattcatacatctccatctcccgttcatattgccactattaaactatgtcgctacttaaacttcccgctgaacttctactaaaggtatcttcacatctagaatatgtttccgatctcgactccctctatcaatgtcatcctttcctgtatactttgttaaaagacagagtcgacgaacttctgaagacggagcagtctatccagcatctcgcatgggctgcagtgaatgggaaggaaacatgtgttcgcaagctgctagatgtaggtgcgttattcgatgattcgttcgctagtgatgctgcgcctggggatgctgcgcctggggatgctgcgcctggggatgatgagtctagatatgatgccgtaggtatgatgcacctaggaatcataagtccgcctgtcgcaagcagagggatgatcctatgacgatagctgcaaagtatggtcattttgatgttgtccagatgttcctcgatcgtagaagagacccgactccagagatcaacgagtacatctacgtcgaccttgatcaccttgttgtcttcggaaacccattgtccgtcgcagtgctagggggtcatacctcagttgtcagtctcttgattgaacgtggatttatcaaacgctgtgcagaaccccggcgaaaagcggttgtgcgacctatcattatgcttggctgttatgaagaggcatgttcccatcatcaaacttctgcttgcaggaggttgtgatcctaatgttgagtgctctaacaaggccctttgcatcatattgccctagctcctgctacaagcgcaactgtagaaatcgtccgtcttctaattgatgctggggctgaattctggacaagcatgaatggcgacgatccagtcttttctgccatggaaaccggcaatgggctgtttctcaattacaccttcccactaattgagactgacaccgaaatatttctgatgatgcttcatatgttcaccggaaaatacaagacatttacctcgtccctcctgaagaggattgatttagactacacaatcacctttggcgcgagagaacgatgtagtcttctgtgtgtcgctgtaggtggcggcttcccggatctgttggagagaatactattattgaggccttattattcaaaggaatggtcttgtcccaaaggccatggaagtcttatggctctcgctattgcatctggccatatcggaacgatagagttatttctcgaatatcgcgccaagcttaggacggccgtgacttatcccacactcatagtggaagacaatgacggacgctggaacttcgatgattgccctccttcaatgattcttgcgcttaaccgaggccatgatgatgtcgtgaagtacctcatcaataagggctttgatgtcgtatttccgtcgtcacgtcatgggaatggttttttcaacagagcactttatctgggcaaagcggaaatcctccagatgcttcttgggagttctagtccatcaatcgaagatattgcgttgtttggtgatggcctgtcgattcagctcgcagtcttggggggagaagccttcttcaaattactccttgagcatggagtacaactgcgaccgggtcacgttggacattgccgcgcattcgcatgtgctgctttgttagctaacgtgcctaccttgacgatgtttttggatgctggtttcagtctggataagcaggcttcagacaatgacgatgacacagtcggcctgttattggaactcgatgaaaatagaggtgtcacgctcctcgctctcgcggctcagacgaaagatcgcaatgccgcggaagctgcggttgattttttgctagaacggggagtgcagctcaaccagttaactggctcttgcaatcacacgcctttactccgcctagccttgggggtagctggaaataacgttagcactgtcaactctttcgtcgagaaaataaccaagaccaaggtggacgaatacgaggttaagcgactacaatactttgaggaaactagcgactacggattactggcaagacagcttctattggagaagggggccgatcctctatttttgaacagaagtggaaagtctgccttgaccgtgaccgcatggagaaatgatatcagagaggtcaagatgttgctgggatatgtcgatccaaacgttccgatcagtacgatcaattctcatatattgacagcgatggccctgtttgatgattctcgcgacactattcaagacgagaaaagaccctctttggccatgcaaaagactccctggaatatttattggcgcaaggtttacccttgtcctagcgaatagttgaatcgagtacaggtatgcagcatgtagcttggcggagatttcgttgtaaatggcagagaagagttatctgatggtatcaaataaatacgctgaatggctcagggcctaggacattccaaattagctaatgagtcaaaccaaggaagtaaatctgtgttctgatactatatacaattttttcatctcacatgtgacatggataactatagttcttgactaacaggtctcctttgcacccgagccatacgaagcttcaataattgacggtattcggatgacccaaaacacatatccgggtcaaatgtggctcctttgtcaaaaagcagcctcgccattgtatcctttcctttttcgagggctaattgtaccggtcgagagttgccttcaccactagggtcagcaccatggtctagtaagagcttaacagccctagggcggccatagcagacagccaaactcaaaggacagaaatggactgcccttcggtttggttgatggtctttatcaaggacggacgactctttcaataccttctctaaaagatcgtcaaggcggttcacaatcgccccctttaagagatagcaacgttgaagattaccgtacttcaatatgcgatccacatcaatccagcttagcagcaatgaccccatctcgtggttgtcccttggtcgagagaattcccacaagacttccaaccatcccaattgccgccaatgaaggttgttcgctaggaggagcttcatgacggggaggttgtctgatcccgcggcttcgagtaacagtttgtcatatatatacaaatctgcaccagcccctactaagagttgggcaatctccagatttgcgggtgaaggtcttgtagcagcagctaccgctagaggcgtcataccacgcaggtcataggtatcgaggctgcaataattatattcgaggaagagtctgacaattgatacatgtcccagttcgacggccttgcataaaggaattgcagcatgtctatcgtggctgttggttttgcaatcggccttgtgttcgaggagcagtttgactactgcagcatgctcgcttgtgactgcagccttgagtgtcctgttgaatagatctccttctttctcggtgtcatgttgaatgcagtagggtaggaacaattcaacaatattggtgtgtcccttccacgctgcaatccttattggttcttgtccttcgaagatgggaaggtcgtccaatatcttcgagccgcacatctgcaacagtttccgcgcactagcttccttgcctttttcggctgcccaggctatcgacttcccaggtgagtctttggcgatggctttgtaaagattcctgtttgacagagcatggaagtggcggctgacccgtgtgaatgcattgaggtcacggtagtcaaggtggagggatatctccagcagcatctcattagggagctctgaaagagtcgtcatgtttcgatatagtttgattgtattgggagaagatgtgtgtttcaaagaaaaaaaggaccaaatctgtctgtctcttttgactataataccaggtggtttctcagactgaatctatgtgatgggacatcgggggatttatacaggttctccagggacctgctttgaatcgtgttttacgttgaataaagccagtgtttcaagtcaacgccttgttcttcgtgtgtggtagctctttgatccggaaatccaatatagtctcaaagggtataacaatatcgctatacattgtgaaaggggggttggcgcttcattgtctatttatggatactagcgagtacaagggtatatgcagacacaaagcccctagctattccatatccttgtcaaagaaaagcttcaacttcattttcagttgtcttcatttggaaacgatatcaagagtcggttgaaaggcgagattattttaagcgctcaattaaaattcttccgtaatcggattttcaagcccgggagagtgggtgattgcccataatcatgctcaaatagaagccttaatgcaggaactgtttcgtggctgagacgcttgacatgttctgggtctttcatccagtgccgtaagcgccgttggaattttagtgcgaatatgaaacataaggagaagcaatacgcgatgcgccgattatcattgaaggggcccaggcacgggcacgataggattggtccatatatttattacgacttcctaagcgcttgatgtatagttcccatattgtcgggaccatagcaccaataagccctagtctcatttatatcagtcccactttcatactgcttatacaccctattcctaaggcagcgactatcctaagaggagccctacttcatcagctgcaatgagataccaccgaagcgaagctcacagagagcatctgcaacccctataacgaaagaaactacaatctcacaatatgtgctccgtagatccttaggtatccatcccaaaccggccaaggagtgttctcattggatcaaaccgttttgatgcccgaaatggcataacctatctcttatctaatctgatcatcaggagctaactatggggattgcaactgcccacgtgagtgtaggttatattgactgtgttgttcccagagatgaaagagaccaaatagaatacatatgtagaattccccagtagccagtaataaatatgtggtaattttgtacagtcgatcaacttcaaaccgctgtgacgccactgagatcttcacctccagtcttcttccgcttctccctctctccctcttccacccctcccccaacctaccgcggctcttatttctctattgatttcgatgtaacacccccttaatacacgacaatgcctccatctcgagtaacatcaattcttctctttccgcgcgcgaccctctctccctccccttcaacataccggagcatctcaacccaacccctccgaccgcaattacacccacgccaacaacaacaacaattcataaaaccaaccatatcctcattctcaaccagcaatccaacccgggcgcgcgaacaaaacttctacgaaatcctcgacattcccacaaccgcatcatcagcggagatcaagaagtacaccacccacacccacaccagccctcctccacccctcaatctccaaccccatatatctctttaaatacttacctacccaaccgccagacaattctacgccctctcaatgcgccaccacccagaccgcaaccgcacagacccagacgcaagccaacgcttcgcccgcatatccgccgcctacaacgtcctcggcaacgactcaaagcgcgcagtctacgaccgcgaccacggcttccacagcgcgcaccacgcctccccaggccaaagccacagccaccaacaccctatgggcagccacagcagctacgccggctcacggcccgccagcgggctgagcaaacggcgctcggcgttccacggtccgccgcctagtttctacgagcagggtgggtatggtgctacggggaggcaggcgcagggtcgggcgtcttctggtggtgcttcggaattcggggctggcgctggcgctggtgctgggacgaaacaggctgatccggaggattgggaggggtttattcaccggaatccgttgcatcatttcaatgctcagagtcatttccggacacaggcggcggaggataggagaaggagcaataggaggcagggagctaggaggattgatgaggatgaggttgatcctagggttgatcagacggtttcgaggttctttctttgttccgggtgtctaattgttatgctcgttgtagtggacttttggcgctctgttcctagtgctgttgatgggaggaagacgaggaagcagaagggggctttgtcttcttgacggagttgttttttcactcatacttggatacatgtagtttcttggtatatatagtcaagtgcattgctggttgatgtactcctactttggcatatctacgggcacacctcgtagtgctttatcctatacaaatcaatcgaattgatcaaagaaacagttgatttgatatacaaaaaaagtgatcgagcagaaaatctacgacacacatcgttactatcttggacgaactccaccataatcatcgttctggtgaatcagcaagacaagtgaactaataactgaagtttacaataatcttcccaaaagatggtaggccatctgtcaggtttctcggaggcttaggctctagaagcttaagactcgaaggtgaagctggcgccgaccttgtgggcagcctggttcaggttctgggtatcgaaggaagcaccgaggccgagggtgacaccagggcggagcaggacgttgtaagccagagcggcaataccacggtcgttgatcttggcctaaattgcgagaaaattgcgcgattagtcgtgatctacatagttatataagcagtttaaccgcgtgaaacgaaccttagcgaaggaagaggggtccaggcggtacttgctggcgacctcgaggccgacggcgttgccggatgtggagtcccaagaagccttggcaccggcctcaacctgagcgttgacgcggtggtagtagctggcggagaaaagggacaggttgttgctggcagtgatggcagcggagtactgggcaacactgtagccgacggcagcggagtacttggtgatggcggccttgttgacgtcgtaaccaccctcagcaccgacgaggaagccctcgtggccgagaacggcgtcgaagttggcggaggggccgttcagcagatcgaagaaggcacgggcgttcaggttgggctgcttgaagtacaggttgagcttagcacccttggactgcttagcgggctggtactgggtaaggatctcagccttgaggcccttggcgatgttgttgtcgagctcgagcttggtgtcgagagcgttggcggtggtccaagcctgggtgagggtgaggcctggtcggagtgagcatattagcctaatcctgtgtatcttggcatcggaaaaaataaataagttcacccggcgcgctattggaataccgcatcccaacatcaatgacataagacgggccttgtgcgcgccgggatctggaggtttcttctggagggggcgtttaccagtgggcgcatcaacgtatttggcctcgagctataggcgcactagttagtaatttgcatgactggattcagaaatagctttgcaactaacctgaccagcaatggggccctcgtgagcagactttcccttaacggtgaaggtgacaccgttgggagccttggacttgacctcaaggttggctaaaagctttgattagctatttaatcttcaatgagtggcgcaatgccatgcagaaacgtaccggcagcgccgtggtagaagtccttgttcaagagctattgggattaggtattagccaaggttccgagttttgtccccaacagttgtgcgtacatcgttggtcgccttggcgatatcggagaaagcagctggggcagacatcttgacgagaaaaatctaattgaagatggaggaggaagagctggttctaggaagagatgagaagagaggaagggaaggaagagatgtgatgatgttgggggaacctaggggcttagcacgggttagtgggaggtcggtgattggcggttgcccggctgccgggaaagcccgccgggaatgtttgggcagggtatgtcacgtgtttatgggagacattcaaaagacattggaatcataacattataccgactatacaccaaaagggtacacatatacaatctaatccggtgctatatcccccaaagaaaatgctagatcagaagggaaagttcggatccttttgtttacatgctctcagacttttactccaccgacttctcatacttctggttgtggatggcgatggctctgcaaaggatggttagagaaaataatcaagaacaggggaaataatagctcaccttccactgggatcgctctgcttggaccaggtaggggtccatcgctcgacagtaccggcacagtagggagggaagtgctcatcgaacatggtacggtaccagtatctatagctaggttagttttcaatggtactataatatgaaaaaaagaagtgggaaacatacgcctccttggtgtcgggaacatcagtaccccattcggccttagggttcttcatcatctcgtcggtgacctggcgctcggcctcatccttcaggccatcaatccagctgtagccaacgccatcactgaactgctccttctggcgccagaggatgttgtcgggcaagtagggagggtttccaggctcatcggtggtgtcaaaggccttgcgcagcatgtgcttctcgatacgctcgggggtgatcatcttgtccttggggtcaacacccatggcggtctcaaggaattccttgtcgaggaaaggaacacgggcctcaagaccccatgcggaggtggacttgttggcacggaggcagtcagccaagtgcaagttcttgatacggcggacagtctccttgtggagctcctccttgttaggagcagcgtggaagtaaaggtagccaccgaagatctcgtcggaaccctcaccactcagaaccatcttgacacccatggccttgatcttacgggagagcaggtacatgggagtagaggcacgaatggtggtcacatcgtaggtctcgaggtggtagatcacgtcagagagggcatcgaggccgtcctgaacagtgaaggtgaaggggtggtgcttggtgccgaggaacttggcaacctcaagggcagccgcggtatcgggggcaccgggaagaccgatggagaatgagtgcaactgctggaaagtggtgacggtggacagctcgttttcttcgttgattccaaccaactcagcgtccgcgttggtgttctggggaatgttgcgggcagcttcggccaagcgaagggtctcgcgctgggcgatagatgcgaccaagctggagtccaagccaccagacaacaaaacaccgtagggcacctcggccatcagacgcttgcggacggccttctcgaggctgtggcggatcaccttatagtcaaccggggtcgtggggacgttggcagggtcccaccacttgggctcgaagtagcgggtcatggtgtcggtgctcgaatcatagatgtggccgggggggaaagcaatgatctcgtcgcagacggggtgcaagcacttgagctcggaggcaaagtagacggcgccgggagtcgatgaggaccggccaaggtagaagctggtgacaccaatgggatcacgggcagcaacaacacggtccttcttcttgtcccagagaacgaaagagaacatgccatcaaggtgcttggggcaatcgaggccgtactcctcatactactatatatcagcattccgaatcttaattccgattcacttatgattggcctgacataccaaggggaggataacttcacaatcggagtgtgtcttaaagttgtacttgtggcgaaggtgcttgcgaatgaggcggtggttgtagatctcaccgttgaccgcgagggcgagggtgctgtcatcgttgacaaggggctgggcaccggagtctaagaagattttgttaacacatcgatcttcaaattccatccttcatagggaccacataccaacaccgacgatactcagacgctcgtgcgccaggactgaaccacgatattagcataccacgccgaaaccgaagtcattgcgtgttaactcactagtgctctgagcgcagaagtttccacctgtagaaaaaccttcgttaaccccatgatcctcccatataccgcgcaatattgcgactcgggttgtgactcactccaatcgggaccacgatggcgcacactatgatcaggacacgagtcagcattttgttgccaattgcaaattgcagcaattgaaagagatactcacgccttggccatgcgcaaagctgtaggcttgaacttttgcacatcgggatgactataggagtatggttagtattccgcaaattgaacatcccactagaggccgggagttagggtaggacatgacgcactggtggcacgcgaaaattccacacatgatgggcaattgggaaccggggtagagatgaagatcaattcaggaggacagagagaagaagaagaagggtacgggctgaaattgactaatcgtgcgattatatggggaacctctgagcggcgatttttttcaaattgggtgcccgccctcccggcggggcgatgtcggcaagtcttttgagtcaccgataagatagcctgtgggcatcctgggccaattccaagtttacaccaattagcatgtcgggttaagagattttagctgcggtggcaagatctgtcactataggcgggttctttttgccgcgtcatatgactattggagtatagatccttggagaatcatcgattcaagatcacgtgactgatatataccccaccatgaactatctagccctagccaagcccctccttgtccgtttcaggaaactgaaatatatgctgatcatgagcttgtttcgttctacaagcatgtctatggattgcttctagaagcacactttggttggagtttattctcatttagcgaaagcttcttgtgttgttcccctaccatcagcatgtgatctttaacattctttgtactatagagacagctgggaaagccaattccaaggagaaagcgagagtcacaaagacaagatcacattcgtctcgatattgaggccatcaagatctaccgagacaatatctcttctggcttctcattttgggcctcaagagcaggtgtgatggtatcatcttgatcttctcactcaatgctaaaatggtgagtttcaagagacatacacagcccggtgcctatttaatgtgatgtctcgatgtctccatgacggtaccttggacttgcgctagctgtattggcaaatatgacgcagtgttcagtacacaatcctataatgttgaaattccaattgaagaaaggcttcatcaagtaaatacattggtgtcttgttaattgaaagtggaagttaaatgcagctttccaagacacccatcatggactcatgttgcatcagtgcagagaggtccggatattgtgctggctgctcaggtgattttacctcacaggagcagataggtacaacatcaagtcgcctctgcgagggtcatcctgaactcaatacatggcaagcgtaggtatcctggtagggccatgtatgtggtatcattgtttcggaatgaccctaagcccagaaaacgccatccattgggatatgtagaacgccatgctcgcgatagaaaagcaaaagttgctcccttcctttgaaaataaatgcataatcttcccacaatctccgcagtatcccatgctgaaaaaaaaaaaagtaaatgacccatggagcgccatcgctgtttacgcttgggtaactcagagcttgattgggctggtttcctaattgggctggttttccttgacagccatgcgaaccctgcgttcgtattgaggacggtccttcttgaagaggttgtaggcctcggcctgtgcaggtgactcagggttcgggtcgtccaggagatcttggataccgagcaagagctgcttaatagtgatggcaggtcgccagccctcctcctcattcagaattgacaggcaaaccgttccggaagggtagacattagggtggaaaagtgctggtgtgaatttgcctgaacagtcgtagtattagtatgagattatcatgagaaatcagaaaagatcatagtcgtagctcccattccggtatatcgcaaaaaggatacgtacatttgggaggcttggtagggtattctagaagcatggaaagaatgtagattagtatgaggatcttcagtagtgaatgtattgcgccactcaccatcagggaaaatcaagtcaatcttgaaaagtccaccttcccagagagtgttagccttccctggaatagcacattcccagttcttcagatccaggccaccctgcggggcacgtttaggctttgcgacaaagccaaatgggtgatcgcgacgccattgctttctagcgattccatgaatgttagtgcggggaagggcgtggcgcaaaagatgcgctgaatcgcgggatctgcgggataagatatatgcttaccgctcttcctggagacggttctggcacaacgacatctcggggagtgttcagcggatgagtagctgaaacgggttgactggcggaggatggaagaatcaagcagcagaaggatgcaacttggccgaaaatagggtgtaggtcccgatggctggctgactggtgggtaataagagagggagaaagaggtaaggggacgagtgggagattttaaaggtggcaatcgtcaaagcttgggaggtgatagcaattgacctccccacgcgaacaatgagtttgcttatgtaatgcatgcaggccttgtccaggaaccaaccagggagcctcacttctattgttaggtgtagatagcaattacaactggttctgcagtattttctttttgttgtcttctatgtggttataaaattaccacatttgtccagcggtcttaatctaatatcatttgttctacttctccgatagaagtactgctatgtatatgtaggactaaacacttgcactttcagcgtcagtttgctatgacctaatgttgaaaatgtgagctcaatcgatcagaatactgaaagttcaagagtctccaattacagctcctgttctgtgccatgagctgcacagagcccttaaagatggtacctaggtcttgactacaatgaggattcgtgatgctagacggtgctacatttatacctctccttaatattggtacaggttattgatcgtctcataaattttatcatttgatgtatgtaactgcgtacatagagaatgatatgtagaaagtatgcggcgaagttacacgatttgaggggggaaacaagcgtgcttcgcgtgccaacaaagaggagggcgagaaacagacaggagaatcattatctggtctaaagttttacaaattgcagtaacaaataaagtgaggctttgctagtccgtgggcaaatatcaattctttcttgctaagcagcttagtggttacgtacctagccctaagtagcagggaaattataggcggaaaatatgactatagaaatacgtagtagctatgcatagttcggggagtgtggatctcgaatatactaatcctatttatggcatatatctacgtttatactgtattaatatcggtccaaggtatagcaatttagttggtgatatccagcaagatgttcatatagagcagcaagctagttatggacttccgaccaaccctacctgatagaattaagttcctgctattccaacctccataaatatgtcgtatttcaagagtcattatccttcgcctacaaagttatggacaaaggcctccagggtaacaaagagccaaaaatgctctagacataatgccttccacccagaacaatagctattaaaaaccaacgactcagcgagcaaatgtttctttattcgaaccccggccggattgatcctcgacaaaggctctttccaacaacaagtttgccggcagatgccaacatactttggaatctgggttgaggcgtataaaggaggacctgctcatttcatctatcatactcctccgaaccacaatcaggagcccttagtgaaactcctatgagcaatatttacatgaaacatcccaaagttacttactattgtttaccataatgtgtcattccatcgtctggtactatgccctatgccagcaccaagacccggcagcaactcgcctgatcatgtgccgcagagccttcatagtaggctacgagtgtgccgaagcgcaaaacacattctttttctcgattatagggaattgtgcacaatgcaggcttaaccagctgctgctacgccactctgtctttcgcgactggcggagagaagatgttctgtctgcgctcaacggtgcattccaatacagcgacgaagacggctggaatatcgatgacagcgatgccgacgaattagatatggaaacttggattccccagtctcccagcttgactactaggactttcgctgagcgagctgagaaccgggagaccaacgtatcattccacgagggtcccgtacgcacgccgaccatagtgtaccagtcctcgcctcacttgtcttgtgtcgctttggttgaatatgctgatgactacgcagatgatgaagatgttgaagatgagcctttgcaggagcctcagccccagacgagccggcgctggcgctctttgattcctcgtcctactaggttggtgcgcaacgagcagaatgttacatatatggcgttcagcactgatgacgatatgttggacacagagcctttcctcggcactcctaaaccgaagaagtatcatcggacttggcgttcctggattccccttcctgttaagaagttgtcggagcaatagattgatggaatagagtagtaggatggaaatctttgatgtttcataggagattagatgattgaattttgagatgattcatagtctgcattttgttttacttttagagtaatcctaaagtaatcctagggaacatcgcaatgagacttcactagagcaacatcaaatgaaattgagcactatcattaacatagctaattaataatatgaaagggtataaacataagccattggccatgtaaaaccccggtcatactcctcggtccgagaggccttgctatgattttgttgccgtgcaatagtcgagaatgcacaaattaacatataatcgagatgtcatgtcgtataagagaggacgaacatgggcagttagactgtgtaaatcccttggttgaacttgtcgagatcaaaaaatcgtgccgtgatttcgttgccattgaagatccggccttcgagcgcgttcacggcctaacggatatgcaatagtcagcaatgcacaactcacatttgaatcaagacgtagatatcaaaagcttacccgtagaccagacaagggatgagtaaatttgatcaagaccgggactggggttccgacgtcgcgagggatgacgactcgctccacgtccccatactatgagtcccggaagttagtaaaagcacccaagccaatcgaaaaaggaaacgtaccttctctttgcattcatctccaatctcctgtaccaagccaccattatggcttccctctatctccgcatccaggtccataccgttcaacatgccccgtaggatgaccacctcactcatagggccaaacttgctggtttcatattcgcccttcttgttgcttccaatgatcttacctcgcccggcaggtgtgacaaagccaccaccctctgagtctggtcgcttctttcgcttctcaagcttgacttgcagcggcttcaccataccagaaccagtagcgccgaggccggaacccttggtccagccatacttggaaagcagtcgttctgcgaaaccttgttgcccgggacgaagagaccgtggagcggactcgtctggttcttcctcgtctgccggttgatcttgggccaatgcggcttcaagttcggcttcggaggctgggatttcttctgggggtggcggaagattgtatcggactggtgcgcgggatatggttgcagagcttggctggaaggcgtcaagggggcgtggtggtggaggtgggatggtttgtcccgatggagggtcatcggaaattggaataggatcttcagctcggcttggagatgaaggcggaatttgtgcgtgagtagcgattgaatcattgtcgaggcgttgccctaatgctgcacggcgagcaaaggcatcgtccccagatgtgtcattggggatagaagctggtggtggcacgtcattgaggtttggcggcggcgcaaagttgcttggaggcgcaaattgttctggtgatatcttattagcctaaatatcgtcactcatcgcaaaagaccctaacatacgcttttttggctggtcataatcatcgctatcggaatacctgctcggtgagcgcttcctagcaagcgcatacaaggtatccttccactcgcggacttcaaagatcttctcgtcactatggccgtattccgcgcaatttgtaggccgagaagagtcgtagatatcttcccagttttggacaacatgtgtttcaaagttcttcttgcgcttctttcttccaccacgctgtcgcttctcacgggcgtacccatactcgtcatcttcaatggccgtccaatcagccaaagtgctctttgtcggtatcgaagggttagctgagggctgtggttgaggtgccttgggtaaagtatgtttcgattttggcttctgggctgagagctgtggtcttttggggggttggaatcgaagggaggctataaaaaaacatcgcacgtcagcatataccgcgtcgatattcaataagtcgagggtaaataccaggattcagttgttgctttttgacgctcgcgtcatcaggttgaggttctgtctccgcctgcttaaagacaacaggggcacgggagatggtgccaggtgtatcgccagacggatttagtaggttggcatacagggacatgccccctctcggaggagtaggatcagaagccatcactgttatgctatggtgagaaagtggttgtcttgaacgtcggcatcgcgataaggcttcttttatctggcgccgcaactctccgactctccgcctccccaccacctataattgtcacctttaccatcacctgtgccatccttagctattcctcgtctagttggtttctacttggatttccgcaactttgctcaattttccattgttaaaataaaatctgcgcctctatttaaacaagttcggccggcaaaggtcgatagctcaagcccaagcctaagccaaaaccaaacccggacgtggacacgatgaccgaaccaaacaaagcattagggaagccaaaaggggtatgtacgaatgcattgcacagaccaatataaacactatcaggccacttgatttcttagccaaatcctccaatccttcctccgctcttatatcaaatgagtcctttaatactgatatcgatctagtctctcaatgctcctattgcagctttcactatggctatcctccttttgacatactgtagtagctctatccgctctgcacggcgagatgcccaaacccatgttcccggtcctcatcagccacctccacgaaaagacgagtcctgggttgaacaagcacttgaggagagtcgagcgcagaatggtgggaagggacgatcctgaggtttacctacatacatatgtatgttgaagggtgcttttctacatgtattatatggattgaatccactgaacaggtgtttgataaatagattgtgataccaacatgtaaaattctttgttcattcgctcttgttgctatataggtgaaaagagagcagaaccaactggaagtaacatctgcatcttcatattcaatcagaattttcagtgtatgaatgatcatgccccgggagtctaagtgtattgacaacccagttcaatcttgaaattgttcatcatgcgaatagtgaaggaatgtgtgatatgaccaaaggatttgcaaaattgggtgatatgagaatatacaggcacatatagctgcttttcaattgatcaaatagtcgcaaggtcagtggagttattgatttatgtaaatcaggttagtaagtgaagctgattgaaatcgacacctggttgatctaaaattgttttctgaccactgttaattgattccaaagtgccagcattgaacacttgagtatcaagtacagattgatggtttgtcgaagtgaaaaatgtggagggagaagtggaaggaaaagagggaaaaaaaataattgcggcaaatttaaataatgtgtcacgtgcctgtcccataatctacttagcctaggatgcatctatacaacgtttatcatcaacaagctgtgtggcaggttttccacacactgtactttccaatgtaacaattgttaggcttcgcttgggatgagagttgatagtaatctgccattcttgaaaattcgcgctactttgaactcatcaaacttgtcacaaactccgaatacaacgcaagtactccgtacaaacaaggcggaatccaaagagatgggtctggaggacagttaacattcatgccagaggctttgcaatggtcgagatgaagtctgagctaattttctaacagatagcttcaattgaaatatgctattcgtctttcagaatcaggcttgggggccgtttctttatttgaggacatatattcacaagaatgggcaaccatgtagaataggtatgtatgtacagaaaatacatgcagaagccaggaagataatagacaagtcaaaaaggagcaagaaaagaaaagccatgcttggaggtacaataatgttccagctaaaatgcagcgagcatatgaagacatgtgaaagctgtttcacatgtcagagccctagaagtctggagacactgtcatctatgccgaaacgctcggatgctttcagaatgcagtagcaaattttactcgctaaagattgatctcaaatatcgagtaacagaccgcctcgtccatgtctatacaggttgtgacaaagggaaaaagaaggactcggcgatcagaagcggtggggtgcgatgtgataaaagcggatatgaaggaagaggatgaagcgtcgaggttgaaggttgaaggttggggtggagcgtgagggtggagcgtggagggtagaggttaaaggttggaggttggaggttagggttggggttggggttgaaggttggagatagtcttttgtgtgatgatattgtgtcaaatagatcgcgcagcttcttcttccgcctggagcctcagagcaccggcatgctgcaaatcaccgatctgccgccgcaggtattcgtaggtgagcatggtggtcatagcagccggaacggcccggaataggttgacgccgatccctgagtaaaacgcatgccatccctcctccttgaggattgtttggaacgtgcgtataacgccattgtaccgtgggcggctgggcattccatctgacgaggatatgccacccgaccggtcgcggtcatgtggatgtttcaatccgccgcggaatgcgatctcttcgtgggattgcgccggaacaccccgttgctgtgtttggagtcgtgtccgcaaaacctcgtgcgggtacgtgattgtgctggcacagatcttgctgaggaaagtggcagcggatattccagcccagtgtgagctcccatcctcctggtgttcaccgataccagagcccgtgaacgtcatttttagatattcgtaaagtgggaattgaatggccacatgtgtcagtcccagcagagccggggtgaggccagaatagaaggagcgaaggccctcaatttgatacatctttcgagcagcatcccatgtgcctttgtattgccaaggggctcgcactccttcgctgttttgtttaatgctttgtgacatgagcctagttttgatgacccaaatagggttcgtcacaaccgttgaacatgcaccggccgtgaccgaagcatagccgcgggataaccaccagtttcctgtggttttgtcagtactgctgaatgaccgaatccttcattctggagtacttacctgtcttgtcatagaagtattcacgagcacggtcatagactgctagataaacagcccacgtggggagatatcccagcaacattggacctagtccctggtagagaccgcgaatgccatcttctcgccaaatcttccttccgcttccaagcaagccacgatatagcatccccgaggcaacttgctttgctccccgccgaaacccgccctgggcttgaagcttcgttttgataacatcaagagggcatgtgacaatcccagaagccatgccagcactggctccgcagagaggtgctacgtaaaagttgggtatcttggtggaaaagagctcgaggcgaattttgaaatcggagatcggcgcgggcaagttgggggcattgtcgacatgggttgaccgagcttgggattgggagctgtctggagcgcctcggccgtttgtattcatcttggcggctggcgctcacgcagcttttcgaccgtactgaatcaatgaggcttcccggacacgagcatagttatcgagtggctcaatccggaacccgagaatactatttcgaacggagctgggaaagagatgtagatttatccggaggtccaaggtccaaagtccaaagtccttcgcgggtgtaaggaaggaggtatgagtaatgacggagaattgagagagggttttggggggccgatgttgccgaacccggtgtgcttccttttgaatgcgcaatgttctattatcagcacggatgtgggcggggttctcggaatgatcaagcttcttaacgtaagcagggatcagtggattctttgctgattgacaaatcccatctctctcaaatcaaatgacaagatcgcaaaggggatatgacatagcaaaccgatctgttagatagagtgtgccgattgaacaatcccagattctcgccgcctaaggcgcatatagatcacgtgctaatagcctcaggtgtagaactgccgtttcaggactagccgcccgagctccgttttgcacaacctcgcaacatcgggtcatctcgtgttcccgatagcctttctaacctttcaccacacccacgtcaattgggatacccgggattcaaaatgtctgccccttcgctcgccagttacatcgtcaagcgcccatggctcaagagctggctcacccctctctcccactggtacaccgatgccgccggctacaggagactcggactcaagtaattcttgccctctcacatcgacaaccccccaccacgagcgattgagacagggattgggaattgtcaggtcaaattcgtcatacgtcggtggcatatcttttgaatgcaatcggagtcgtgtcgaattcgcccggagccccggtcttgcggatatcgttcgcggcagggttggaccgaaacacttgctaaccgcccaactaggttcgatgacctgatccccgaggagagcgagaacgtccagaaggccatcaagcgtcttcccgccaaggaggcctatgaccgtgtcttccgcatccgccgcgccttccaggttcgcccgatcccttctgtacccgactggcgcaaaggctaacaaatgtgtcaattgcagtgctccatctcccacactcttcttcccgccaacgagcagatcaagcccgaggaggtgagtccccgacatccaaatttcgccctccccgcattagtctccatatcggccaatcctgttgcacggatttgtcacatccaatccgactccgtttcggggtatacactctcaccacaacgaatacaatgctaacgatgcaaatcaaataggacgtcgagtaccttagccctatcatccgcgagatcgagaaggaggttaaggagcgtgctgaccttgacaaccttgttgtccgcaagtaagccgttgctacttggttcaatagaatatgaaaacaaggggttggggtagcattgttcttggcatggaataaacgcctggtgtgctttcttcgtaatggaatgggcgttgtcgtcggcggcccatggcttggttacgcagcctgagtgtactgatactgtacaaatcgattttcttcgcgcgcttatattcatggtccatcttgtatcgacaagcgggtcttgcacctcttggacatcactctgtagtaatgactggataagctatgcgggttgtggtagctggtctgtttgggttcgcccaataactatgcctacacagtaaaccatctttcaccttttcttatggctgtgaactcaaagccacaattcatttcaaatattaaatatatacactataaaaacttaaactacaacctcatctcgggtggtcgacgtctaaatcacacggtatcaagacaagccggattcacggatgtagtatctcttctacctcttttaaccgccaagaacagcaacatcaacgttctcaatccgccacatataccacatgaacagactcctagagcaactaggttagcacattgtctgctagttaacagtataaacaggatcaagcgtacctatatggtgcaaacttggcagcaagttcaagcatatccttttcagccatatatttgaacttaccaccacctttgcccttaagtttgctcacatcacgacccataaaggcagcgcagcctcgcctatcatagtgtcaataaacgcttccactaacccacagcacaaacatcacccagctataagaccaatagaatgaaatcaagaaatgaacttactgtactcccaaatccccagtagaaaacacatcaatgcgcttaagcgcaaacatagcaaacatctcaaccgaccacttccccaacccccgaacagcaataagcttttcaaaaagctcctcatcagtagcccgcgccaacatcctcgccccaagctccccactagcaaacttctccgcaagaccctggatatactccgccttgcgctgcgacagccccgccgtgcgcagggtagcgatatcacacttggcaacctgatccggagtcgggaatttggcatgtctatgcccatcaggcgcaacagtatcgggcaaatcaaacagtgacaggaacttgttccggatagactttgctgccgcgccagagacttgctggccgatgatgctgctggtcaggctgttaaaggggtcgatttcctctgccaggccggccggcgagaagagcggacatggatgctgctcgatcactactgcgatgcgcgggtctgttgctatgaggtgcgcggtggctttctcgagcagtgtccctgttgtggctgttggccgtggaagtccggtttttgagggggaggcatcttccgcgtgcgctgggtaggcgtttactgttgagccgtggggggttatgaggattgcgtttgttcggtgcgggtcgacgggacggtcgaggggagggggggtctggggtctgaatatcgtggggttagtgggtgagagttggttgtctgtttcttgtttctctgcgactgcaggctccggggaccaataggaggtccctgtttttggttttggttttgtatttgtaggtttcttgtctgatttgttggtctttgtgggtgccttgcgaggctttgtcactgcgctgtgttggactcttgcttcgctcggagctgagctttggagtagcggtgacttgatggttgggacggaagcaagtcgggctgagcgtctgagtgacattcttgaataatatcagatattcaatgacctatatatggggtactggacctgaggaggtctgaggagtcgtcgtagcggaagctggggtttgctgacgtgcggagttggagatccgccgcgctaccccacgaatgtcaaccacactgacactcttcaatgggagctggacagacagacatcgaagcttaataatattcatcattgaccgttgattttcgatatggtaatcgctcttattttcgtgcatgcttaccacttctcatgtatgacgtatttccaacatatgcaagctatagtcatctatatatctgagacctttagacaccgttatgggatcccatttgactgaaagcctacgtgcaggagtcgtggatatttctagtagtttcaacaagcacctgtggagctcaggaatttgtttcttacgccaaatctatgaagaggagtagggttgcctgccaagagttatatccatgggttatattgaaacttacacgagtaactaactaggatcttatgaatcgcacattactcctcttgtcatctctctctaatcaatatcatcgtcatggattatctgcaacatacatcaactcccttcgttgtatagatgtggtatgcgatccactgatggttctatgggttgttttattgcaaacagtgctatgattccaatgttacatcgacgaaagttcgataaaagcctcaatgcacatagatgtagcatccaaggctatttgccccaatgatatctatggtatgtgccgatgatgaaagatgtacggaatagacagttgctataaatatccctataatcttgggagacgtatacggccagtgattgtaccttggatttatactgagaactcacgcgattggatgcgatatactccgctacagcattgtcccaaggaactatccgcaagaacaccccgtggcccgaaattgaagaaccatggtagcttggtaatatattacgagatttacatgaaatttgaaagacttaaagatcgaggatgggtataattcgtgatatattagcgagattttggattgaactattgttcaaaagatcggggctcgcgtcggtggcttgcgattatatattaacccaatcgccgacgaattttatcggaggggttaaaatagaaaaataaatgaaagaacagaaatagtccaaacgaaccgaccgttcatctattgcaattaatagatatcgaccaataaaaaccgagattatcatttaggccgaagcgttgagccgagtcaactccaagacgttggtgcattagttcgaaatcagaaacaagaatgaatccctgctcgtgcgactaccactagaagccatcagactatgataactagaaggtctcgccttacagccccagccttcaccaggataatgcacataacccagagtggtcgggcgagtacattgtgcgtgtactccgtacttttggatcattgtccgtgttctagggaatgtggccattcgcaacccctagataggtcattgctgagcgttccacgcattcccatgcgtggccctctcaaccttttagggcagacgggaatgtgtgttgaatgctaggcagaaatcaccatacacttgtttctttgtctttcgtactccgtacctactgtgacaagtgccaagtttagggccagtacagctggactcagctttggggtatccatatttgtggcgtaacgagcacgggcaagtattgaagtcagtatgtgtcgaatttttccgaatcaatagacttgggtttcgcgacaaggccacgcggccattcttcatagtcgaagacgtacggaggaggatatagcaaatcattgaagtctttcgataggattggacgcgatagaaaaaaacatatcacgtagtggagcagtacaagagtggggtgcgacgtatcgagtgagttggcttcttctgaaacatttcccgactttacatcgccaataaccactttgccacccgaaaggggaacgacatttaagtcagttgtatccggagtacgaagtaaatattccattgtcaatactgtcaattccattgggtcttctagaacgaggtgcgatggattcgctatcgaagatgtaccgggccgatgaagctctagacaatgcttgacaggagctccatcgccggggccaaagttatagccggttctgcattgttaccgaaaacgcacagatgttgaaattttcaatgtacaacgtacgaaaatttccaaatgagtccttgagatcgtctggaggtgcgtccttgtgatttaaagctgtacatgtacatgtacaccgtacaccgtacaacaaggcaaggcaggtacctatactccgtacttggcgaggttatgtacctaattgggtacgaatggaaagtgtggcgaagcttcaaatcagtcgtgatcgactaccgatctccgagaattagattacctcttataccaactgatgtgcgcatggcgcataaattaggggtctgagagggactgcatggcttgatgcttggcataggcttttccgagcaccatttgcatatcacattcacgaggggggcgatgtttcgcctcaggtagagttggattttcggaaaacagccaggattgacagtaatccagggcgagtcattccaacgtgccaatcaaaagtcgcgcatgccgcaatcgacgatagcggcagggggcgggtccatagaaggcccgcaaatttagatcggccactatcaaagtgagaagcttcgaaaccagtttgaagattgcgtggctagtgtttcggggagaatcggtgtgtgtgtgcactgtgcagtggtggaggggttggcagttggtatgttgtaggtacggagagtctatagacctatgcattgtataagaatagttataggggctgagattgtctcatatagatgcaataagattgaacgagaaatgaagttacagtctaagacaatttaagatcaacaggggagtgagctgtgtcggattactagatgacgacaggttgataaattggctagttaacttcttggtcaagttcgttaagacgttcgtcacgagctagtatcatgcattattattagatccttctagtattaaggacgccggggcgacggtataaatttacatggtccatgtccaagataccgaggatatgacaacgtacttttgatatccgcaaacaaagctacaagacaccaaattctacggtagtacggagtatggagtacagagtacagaatcgccagtggcaactatcagatcacccaagttataggctaccttgccgagtgcatagcccgaattgaaagtgacgaaaacatctccaatatcatgcaaacatgaatatctacatgtgaactccaatattccccagtctatgaatcatcatgtaaacaaaatactcttccaaaggtttaccaaaatggagaaaggggggcgacttagcgttgaaaagcagggaattggtctggagttatttaagaattgagtttttgatttgattggtaatttgcagtcctgggtaattttcagctctggtaatttgtggtaatcctggtaatttgcgtaaccgtccaccactcaagtcacgagaaacccgataaattacctggcactgccctgacatgccggatgcggtactgtgtgtgtttcttcccccttggtatagtggcacctggtaagattagaatacaaacaatctccaccctcccctttcctctcgccccaaggctccttcttcttcctcattttactctcctccaaccttcgtccattcgttcttaccattatttgaagttcctgcctcgtaccactcggcagtatatctccgcttccctctcgtttgaagcgcttcttctctaatcactcattgcgaattttcctgctcaacccattcccatatctctaatcggtaccgacaccaataaccccctgatcgaaaaaatcacactgacacctcctttagaatcttgtgatgtctctcaagtacatcctccccgcgctggccgccagtcgggcagttttcgctgccagtgagtattctgttcccggcataatgatacacccactaatcatgtcctcttacagcttcctgcggtgataccaaggtcagcacccagagcgacgctgatgcggtcaacacttgcaccaccatcaagggtgatatcaccatcgacaagtcctacagcggcgaccttacgctcagcggtatcgagaagattactggtggtctgatctgctccggtggccagaacgtcagctctatcagcgccagctctctcacatcgatcggcaaagccttcgacttggagggactcaccaccctgaccctgcttgacttcgctgagctcgactctgttggctccatcaactgggaggctctccctaagctccagtccctgtctttcgccaagggtgtcacccaggccggcgatgtcagcatcgccaacactggtctcactgatctgaccggtattaccctcaagactgtcggtaccttcagcatccagaacaaccgtgatctgaagaccatcaacatcaacaacctcatgaacgccaccgacttgatcagcttctcgggtaactacgataccctcgaggtcgatcttcccaacctcggcaccggtaccaacatgaccttccagaacatctcctcggtctccctgccttcccttgagaagcttaccggtcagctcggcttctggggtaccaagttcgagactttctccgctcccaaccttacccagaccggtgacttgatcttcaaggacaacaccaagctgtccaacatcagcatgcccgttctgaagactgttgacggtggattcaccattgcccgtgatgacaagctctccaccatcagcctgcccatgctccagcgtgttaacggtgccattgacttcagcggtaccttcaacaagtgagtatccttcccatagctctatctgtgcacatactaacaaccaataggctttctcttggtgctctcaaggacgtcgagggtagcttcaacatgcagagcacccgcggtaacttcagctgcgacgatctccgcaagctgaagagcgacgatgtcatcaagggtaccttcaagtgtgatgccaccaacgccaacgccaccacttccaccggcacttctggctcctctacctcttccagctccaccacctctgctgctaccagctccggtgctgccttcatgaccggcgccaacgttcccgttgttggtattgctgccgtcttcggtgctcttgcccagcttctgtaaggtgttgattagtggaggattcaaatgaccttggggatttttgtacaaaagtctaccaagcagcgagctcaatattcgttccacattgcagttgttacgataataattcggtctttcgtgcagaaaattcgcaatatggattctgacctcgggagacgcctctctggaaggagttcttttcttatccttgtgtttattgctttgctatgttccaatgttcgctcatcgcgtcctaatgcattcggttgcaatttgtaacctgctcgttccctgttgatataccgaaaggggaagctgctgcgggcctgttggtggcatctcggttcttgttgtacttcttgtgtaaacattccttgagtttttttaatgccgtaaccttgccttttattctagttgcgtgcgagataatgattgtgtacctttttccccggacctttattctcatgaaagcagccatcgtacatatgtatcatgctagttctgagtagccatgtctccttggtccattcggcctcggtataccccttagacattgtgtctttgcagtgcctgccgcccgtccaaatagtgtacacacacgaggaatctgtcatccgttttctatatccatcaaagcctgcggctttctcaacaagatatatatccaccatgaatcccattccataaccacgccatgtccaaccaatcgaccactctagttccaactacctcgctacagaccaacttcactagatcccaaagtcaaatctccaaagacctatgaaacatgaaactagtctccccaattccaaatcgcaccgacaagttgaacacagccagcatccacatccatccacatccacacaacaaaacccccggtgaatcaattccaacacaacctagcatgtgtctacctaactagttacatacccaatactactctatcgcacctactccaacaaccccatcctaatctgaggtcataaccgaccagcatcacaaagccagtggatcccggtgggtacgcactaagcgttggacgctagtcactcactgaatatcggtagaacacatccatgtgtgcgttgttcttttttttctttcttggctcgggctagttactaggtaccttagtagttgtgggataggtcaaaggccatggattatgggaaaaggaaagaaaagatgaaacttggttcggcgattcgggctacataggagtcgtccccggggctctctgctcctatgcaccatagtggctgttggggtgcgctttttttcgttggaaggtggaatctgtgggagattggttcggagaattagacaatagtatattatagttacagcgtggaaattggaataaaggaaagtatgagattctattctgttctatttgagctagtaaatatctactcccaagtacataggtaggcccatatggtatgattgtcagtagacattgtatgttgtatgccagggatataatgatagtacaacatagaagtaccttcacactcgttcctaaagctaccatgtgcgtctcagaatcatcctatggccggcatcaagttccgaagcagtcagaaatcgataagtcgaatccacagcgccgggccgcatccctcgatccgattcgaaggctatgtgcgggctcttcactggcgagttacatatgtaccaacgatcgggatcgcagctagcttgaaacggacaacaactttcatcgaatcggaggatgattggtggttggtgtggttggttctcttatccggagaggaatatagggttgaaggaaggctgggacgtttggcgtttcgatagacttggccaatcatgggaggattattttggatattgttatgtattctattagtccgtatatattgcattatgatgaggtacaagtacatattttgagatattactttacaatcgttacttcgcagtcaaggtaattgtgcagtgatagctcgacgcaggtggctgggagaggggaatcggcgatcgttacgctctgaagactattatgcattagccttgcggtcgccggaatcttattttgagagacgaactcccaatcgtgaaaatcaaggaacaggcaatctcaccatttagacttatacaaagtactggtataccgtatagagcagtggatgacgcagggaggggtgttggatgtgtgcatctcatgattgccgcatgtgtcgacttacatgctccagactgtgcctgaacggctaaaatccatatagagaggtgttattttatagaaattggaggaagacagatggaggctgggacaggtacggtgattgacccgtctatagttttttttagaaaatctttcttttctttttgttcctctgcgtttcggggtcacccacttgaaacatttagatgtattcagaggcattctgatctctcggtgtcaagatattcgatctacgaaggcaaaatatcctttgatggagagccgaacagcaccgaacaacggcctgattggccctctctacctctacaacgttgtatctacctctacaacgttgtatattgtaaatttcacgtacttcgtactttgagtggcttttttagtgccctcgatctacatcggcattaaagtgaatatggaactgccaagacaatctcttcatggggtctggcggcgctgagagtggatattgaccctctttttttcttcagaagacgaaactggatcgaacacgggtacacgcaatcagaatatgtaggtaatgttgtcttcttgcctacagaccagcccgggctcagcagctccgcacataaaaagtggagagaagtgcaaggcatggctggcataagaaattacggagcactcggtagttaagaggccatgacagcatacaacataatattaaggtggcaaggagttatcccacaacggaactccgcttctgtatccttgtcagtccaaactgaaatcccccaggaatatgatgcatgcaggccgaaacgagaaaataaaaaataaaaaacaagggtacctgaataaagatgcacatcttcaggtctagccgaccagcagcgtacatccgccttgcattggaggcaaccagcgatccaggtaatgggaaattgtggaggccctgagcgcaccatagtgcgaatcggagcggcaatgcatcatgtaggaaccagatccggacgatcgctcactagaacgagagggaaagcggacggtgtacagagctcctaaagagctccacttcgtatctgtgttgcctcgatcgcgaactccacggggggaggatgtgtgcctgctgtatgtgtatgcatgcacctcgggggcgtccctcgagtgtgatctctcagatgcggcgaatttgagttccagaaatagtccatacaacgtacgtatgtactatgtaccgcgggcgtctgctagatctgtatattaggaagttgtccttgcaggagccggtggcgactgcgccagtcggggaatagattccctacggggattagagagtttctgtatcctcgttcgtggggttggggaattgaaggactttgggctgttggtgttgttttaggattttttcgtacttctgaatggtagatgtctgttgcctattcgagtaatcggtagtgaaccttacattcaagattatcttgtacttcatacggagcatagagtgggcagttaggtcttgatatggccttttctactccgtactgacaattatgatcgtctgcccttgctgctcatgccgttttcaatattggatagcatcatgtacgaggataacaattattgtctgtcaatgctctaaggcggggagagtactctgtacagaggatagtgcccggcgattcatgcaaataacttcctctattgaattgcctaacaggacacagccccttccgtgggatgagtctaacacgagcctaaatcttcatgtttgccactaacaagaacgagtgggaaattctaggcgctccagtagggagacaacacgcatagtatgtagtgcattgtatgtacgaaatttgagaaggcgattctggaaacagggaatagcaatcataatcgaagatctcaaaaaagcctcccccggaaaacgagaggtcgatattgcactcagaaaccacgaatcacattccatggactaagaacccgtccgggtataatatcctacacttcctgattcatgctacaaatataataagtgcaaacagggaagaggatctgacatcgtgcatgaggcgcttttaagcgcttggcgaggtttagcccgatagtattggagcatcccaaatcatcggataatcaagtgactcaaattactccatacattaatctatagtgttcgaataagatttttctaattataccgtccccgcttcgtcaatgacagttgaaacttgacaggtcagaggcggcacgggaaggcgactattggtaatgatttggggagaacaggggagcagagatgctcattggcgatgcgagtaagctttgcgatgacagcgtggaggcgaagggacctgagaagatatgtacttacaaatttgtatatggtggcttgttccttacacatgagagccgcacgggacgcggatcctgtccgagcttggaccgaatgctgtgtaatatagaaacaatatagaagaggggctatgaaagtataatcatcgcatcatttacagccaccgtaagaccacggtagagatgttcatactagaaatgcacagggtagatgtctatgtcctcgatgacacgcacattcacgcagaaacggcccatgatgaaacaaaacccctcagaatcgaacccaagggccaggttcagagtctattcaatgatccgtgaaactcaaaattttcgatttcctagtattaagaagatccggaggggagcccctatatgcacgtcacttaaaatggtaagcagggagggaacaaaaaggacaagcgtgaagatctatggggcccagattgttcggactttccgagcaatcatgtccagagctcgatcgaactcgggttcgtgtgaggttgccctcgagttgctactgttcgtgcggtctgcatatggcgcagagacgtgcgaaagtcagtatgagccaccgatcgggtgcatatgctatacgatgggaacagggaacagggaagagggaactacaactgagtttcagtgaggtttacaaagtacgaaagaggggggcatttaggtgaggttggttatctcttccgggtagaatgcatatacataacagcctgtccttaatttgcatgggctttttgtcacggcaataaataaaaagaataatataataggattgtgaacacgaacggctagaacgtggggactagtgtcctcgatggagtcgccatgcagccagctgattgaaagacgggaagggagaatatgacagctctattccccaacccaccagcggtgttctagtgacaatcgggcaagagagatgagtgatagattaattgtatggagtatattatttgagattatcgagattaaggagatgcaaagagaaatagagaaataaatcgatatgaggactgaacatagggctatccctctccactcagggaacgtgtccatttttaaggtttttagggcttcgctaggaataaaaaccaataaagttaacattctagatattattcccatctgactcgtcaattctctaacgtctgtgtctcacccaattccaaatcatctcgatcgtcatgattcgctgtctgacaggagacgtaccctggtctttgggtctcgtcccaactcgctggtttccccgtcgtttcgggtgacctattctgttgacctgcttctatgactataccgagttaatgatatttggcgtcaatcataacgtcgaaactgtcaatgtgcttatagctacctaggtcgattattcccgatttcattgtatagaactagatccttattcttattgatgtttactttacctcctcgcatgtatcaagatgacactcccgcggtccttgcttgatcctattactgaggggccatttacatttactagaagcgcctcgaggggtattagctcgttgataatagccaaccccttgatactatagcacgatcatagaagtttctcctgactatcgatgcaggagaccggtgtgcattcgttacagcaagcgtttcaccatctacggagatcgcagcgaggatttgatgatgagtacgggcatgaccgcgcatgtagatactgtggagtatgcaggtaaaccttagttcgattcggcgtttttgctttttttgttcttttcggcttcgttctcaccaacaattcccatgtgaattctctggacgttttgatagagactccaacgtcagctattggcatagctattgatgcaagggccataatgcctctaaaaactaaaatattccccgtgtcgatcgcgacaccaacagtccggtgacaaattaggggtcctggatcatcatgaaccttcctctcgggcttgatcgcattcccctcattcgtcgatctgatagattactatgtgaggttcggtctgtgcatgatgtgacagatacgtctgtgataccgaatataattattttcttcgatggcgcttcttcccggcccaagcggacactagcagatggtccagagcacccacccgggatgcccttcgtgcttccccgtcgtcatgaagctgtggggcaaagaagtccatcctctgtctgtatgacatccgaaattccgcgcttcatgtctgtcgaggatcggctggttcatcgatcccctagcctggatctgggaataaggaacaaagtactctcccaatctacatataaacatgcaccccagcccgcatggtatccctttttatgaatatcctcattgtatacactcgcctcgtgtagattccgatttgcttcttcctctattctgtctatagcctgccccctttgtccattactgtgcatatacaaccttgattcatctgcactgtcgccattcaatctacgactcatcgaccctttctacacgaaccacccgtgatctctcagtatatatcctctcggcatagtttgaccacttcgacacactcgccactgcacatatcacgcatttttcgacgaccaactacgatgtacgaagagatgggttctactactgacgatatcacccgccgctgctctttgccgtgagttgcctcactatcctgatatcaatctacatctcctaacatccatccaagttctttccactctagcaccagtatggctgcctcggacgtgggtgagaagcgccgactgcctcctcttcctcagatcttgcctctgccaccccgcggccctttcagcccattcaacgtgaaggacgcccttatccccactaccccgggggtccaggacactttccaattcaagtcaccttgggcagctgccgagcacatcgttactcctccctcgccggccaactctgccgaaggctcctggcaggagtcatttgccactcaaaagtccaactccatcgattggcccactgatctgacgcagagcgagatcatggctctggtggccccacagaatctcaaccgcaaggcacctctccagcagctctgcggccgcaagcgcaagggcagtgcccaatccactgaagatgaccagcgcgagaagcaccgcattgccgagggcaaccgccgcagcaacctcagcgagctgcaccgccagttagacagccgcatccacgatttcttcctcgagcgtgcaggctggaatccttccaagagccttactcaatccaaggagcacatcgtgcaaggagcgatctacctagtcgacttcatgcttgccattattgtccaccttatccggcaggaacaggtcacaccgcagctctcagagaagctgcagccccaggttcgctgcatgcagctgcagcagctagtcagctccctacagcaacaaaaccagactgcccagcagcagctcaaggccaccaaggccgagaacgaggccctcgctgaccgcaaccgcgcccttgagttccagctcaagtcgtacgagcagatgttccgctcccccaagtccgagagcaccagccccggccccgttcttgacttccccgagcacaaacgccagaagaagaatggcctacccggcatgcgggtgctctgcgatgagatcgctgccggcatgccttccgagccttcctatgctgctccctactatgactccatgcctagctcgacctcgcagtcctttggcagttcctatctctctgccacgccgcctatgaccggtccttcttctcctgcctttcccccttcccagtcttcctctttctcatacccagtgccgtcccgtcgccactctctcattacctctccatgaagccgtggagattgatgatgcacgcccgatattgaacactgttcactgatgatatcatgactcttctacctttctgcctgtgccccgtcctccttctcatcagaggcccttgcagcagtgcttgttctccctactatcgggtccgtttggcttcctccttccgtcgtcttcccgcttcatgtgcatttagcgactgcattgtgtaacaatattttgatctcggggatgcaccataggttcccaatttgctttatttcttttcctttgttgattgatttcgttgcgggtttccttttctttttttgcacaaatgcggtggtctttcttctttctttttgtctcttgtcttttggcgttgtttatgatatggatatatgttcaggtggatatattttgccttttgtttatttctttgtttcctttgtcactttctttttttatgtctatagctatgactcaatcgatcatcttggatgaaaatatgctcttgtagaacgatgatagtcctggtagtaaattgtatcatctcccttatcaccatgatttgtgatgatgcatatgccaattctctctcttgtactagtagctatattgatatgcttcccgagctagcacaaccttactctgagaaggaatcagaatacagtaatgcagcaagtgatagatttaggtttatatgtagatatagtacaacccctcgcttgatctcggaccgctgtgcagattgttgtttaggtgaatattaggagcgatatattctcctttcagtggatagtataacatatagatatctactaaagatttcatgaatactgggcctagacatgagaatgcaaagaatattccaatcggtaccatataggatctattccaacgaatcagccgtctctcaggtgtcagccggtggagaccagtccagactgagaaacggacgagttttctccgagtgttttggattgtgactgaattgtattctttctcatgagaatagtagaatagtagttcagatttatacatactagcgtaggaatggtataaaatatagtcgggtccaggccatgtctcactttagcctcgtgttgaagatcccacttgtcatttccaatgcttttattttgtaatctctgtaatcaattaaaatgaatggaattttagggggaaaagagaaatagaagaagaactacaacctcatgttagaatcgacagagatggacaaattaagagtggaaaagtactgtgtcagtgtccacgcaatccatgcagcaaagtggctacatatctaaataggggcacagaatatggagtagatggacagctcatttaattgcacccgtacctgcgtggcaacataataagaagaaacggtgatataatagcccctaaagtgcacgaggttctagatgatccaggctaaataaagggttctcagccgtcacactggttaaggggacaaagtgaataatttgagatgcttagtcgattgtatacgacagtaaaatagccaaagatccctcataactgctcacaatcccatcaacattgcagaataacacgtagaaaaagaaatgtagttgttttactgatctccccccgttcttggcagacaatcgcatttcccccgattcccgattctgttttctccctacccattcgcctcaccattcctctcgacccttttcttttctccacattcgttcggggggttttacaacgagtgttcgagacgggatagcccctggaattctacacaacctcatatcatctctcatcatgttgttgccaaagggtggtgttaattggaaatcggccaaggccagattgcctccatggagggccatcctcgttctattaacacggactcgcttcttggtctccatagccttgaccggtctggtcatcctcatgtggcgcggtgtcagcaggtctgcatcagagatgcaaaggtgagagaaacacgcgatcaaccgagacacccatactgactcgtctggtgccaacagcttctactgctatggctcgagcaagtcacccatggaaatgtccatcaacgagatggtcgaatggagtgcgcacgcccaaacccctgtcctcttcaaccgccacgaaccctacgaagtcaactccaccactatcaccgatctcgacctgaaccccatcaagtctacttccaaggccgctctcaaccgcgaacgtgtactcatcctgactccccttcgtgacgccgctccttacctggccaaatatttcgacctcctttacaaactgtcctacccacacgatttgatcgatctggccttcctcgttggtgactgcaaagatgacaccctcgcaaacctcgcctctgaactcgatcgcatccaaaaccacgccgaggagaaagttcgcttccgtagtgcaactgttattcagaaggatttcggtgccgacgttgagatgaccgtggcagagcgacattcgttcgccgcacagggtccacgacgcaaggctatcgcccgcgcccggaattacctgctctattcggctctgaaggccgatcactcctgggtgtactggcgcgacgtggacattaccgattgccccgagcgtatcctggaggatttcatggcccacgacaaggatatcctcgtgccaagtacgtgcttcttagaatttagatccgacgttggacagctggctgacagtgacattttttttttagatatttggttccaccgttacaaccaggatggccatgatatcgagggtcgctgtatgtatacccacgacaccctgtgtgatgcagattgctgacatctccactcttagttgactacaactcatggatcgaatccgacaagggccgccgcctgcgcgcgtctctgcctaccgataccgttctggccgaaggctacaaagagtacgacactggccgcacctacctggtcggcatgggcgactggcgaaacaacaaggatgaggaggtggagcttgacggaattggtggcgtcaacatcctagtcaaggccgatgtgcaccgctccggcatcaacttccccccctacgccttcgagaaccaagccgagaccgaaggtttcgcccgcatggccaagcgcgctggctaccaggtggttggactgcccaactacgtggtctggcacatcgataccgacgagaagcccggcaaccttggagaccgtaaagcgttctagtttttgcattccgtccgccggaaatctcgattgggatcaagttgatctttgatcccaccccgtccccgaacatccaccagtctccatcgccgcccgtgtgttgtcctcccgatggttaccattaggggctttgaaccgcggcggcttcacttctttcccttctgacccttttcttttccttttttcctctttttgggtggatgtttcgcgacggaaagcctaatgacttccctaatacagagtcttcgtgtcgcgttttagggagtgtgtgtatttgttaccttggcgctagggggaaaatgttgtttggcgggttcgcaggtctataaagttcgccggttctccaggcctctttcctcgatataccgaatctgtgtctgggacacacatcccgagttatgggggtgtgtgtatatccattacactcgagtgattcaatctcgatcatctgttcttcaaacctacattagggacggagaatcggaccgtttattgtcatgtgtcgttttcttgtttcccagtctatttgattctgattctgctacgcaggtcacctccaaattgtcctttcgatttcatcctttttttccgttctgtcatatgctgagctggcgtccttaacattttttttgagatgagagcaggatatcagaccaactcagttgcaatcagatgctgtgtgatgagtctagattcttgcagatgaagcaaggcagatattcgcctgtctgtcgagtttcatgtatataatcaaatgcacgaattcattccctgcaaagatacaagccacatcttacgcatcacgccaagtacgtagttcgctagatctcactcgacggcaatatcatatgggcaaacaataagccaccgctgactaggtttgaatagtatgctctaatttagtaaatacagagttaactagtgaactaactagtcctaaaatgataacttgatacaatcttactcaaacaggttcctatctgcatacccctgcaagaaattgggctaacaacataacgagttaaggctaacaggtaacgtaatcatctctaagccccccgaaagctgtctaagttgcctaactctgacaagatcgagccaatctccaaagatgaaatgatataatcccgactaaaccactttgtttgaaggcgcttgcgatctgcctaatactgcctttgttactccagagggcatgggatctacaggatcgccactataatcaactccagtttcgcttcatcagacaacacgatgacccccgtatctaaaacgtgtcaacgttgcgcagactctaaggtgcgatgtgtccgggataccaatatcgccgcatgtattcggtaggaatccggataacctctccgtggaagaaaactggagctcatctaaagccaggtgccgccgtttggaaaaagaatgtgtacatcgccggactggccgtcgatttaacggctttcataaggaccggtgagctggctttccgtgataaacatggtttaatcgcatctaacccatcacccagtaagatcgccgctctcgagtccaagatcaatgaactcaaggccgaccgtgctggcccaaaaaacaacaacagcacgagcacacgcaatacatcattagctgacggcgatgctcctgaagagatcatcaacagacacttccttgacgtggataccgccgaaaggtacctaagcacgttcaagaccaaactgaccccacacttcccatttgtggttgtaccccctgatgtatctttcaagcagctccgccaggagaaaccgttcctatgcctagcgattcttgcatcggcttcgtacgagaacatgccgctgcagcgggcgctcggcgacgaagtcaagaaagtcgtcgcatctcgcatggtcatcggtggggagatttccttcgagttgcttcaagggctgctcgtgtttctcgcatggtaaccccgattcttatcaatactttgatatttgtgagtgcgtctgacagaatatggcaggttgcattattactcacggccacatcggtatactcaattcctccaactggctataagcatcatgatagatctgcggttggaccgtccgccgcagacacggacgtggaagacagagttgcgcttcgggcttcaatataatctgcaggatcggacgtttaatcggccttcttgggggagcaacgagcagagggctgttttgggctgctactatttgtcgtcatcgtgagttttctttctgtcggggcttattgggtattggctgatagttgtttcgcttaggattgcgatgcttgtgcagaagaaatctactattctacgtctcccgtaccaggaagagtgttgcaagactctccgcgaagccaacgaatatccccacgacaagtacgtcagctatgtgatacagctacagttcattgcggaaaaggtcgacaatttatctgcaaagcatggatttgacttggaaacgcctgggtcggggtcggagctgtatatctcgaatcttaagtcggacctggatgcattctaccgtcatctacccttcgatatcaacgacagctgtaagtcccagcaggacaccaaattcactttcaagatacttgagactaacttatacctgtaaatgaagttcttcttgccatacaataccacgcgacagggcttggcctataccaactagctctcaacatcaccaaccgagatccccaaccccagttcgactccgactcctggaaagatgacatgtcgttctcggcacttatctcagccagttcgattctcaatctctacattgaactcccatcgaacgaggaagtcggattcaacaatacacaatgggtacagatagcatttgccttgctagttacctatcgacataccgtggcagcctcgaagccagatcaaactgctgccttcctacagactctgtcaaaattgaaatcgagggttggggcgttgtctacctctgatgtagatatgaaaggcgctcgagatgctttcttcgactttaagaaccgtatagttcaaatcgagaactggcttcaggggcatgatagacaggaggataactcccccagcgaggagaactttgaagagtttcaacatacgttatgcgtggaatccgagccgacgcactttgacgggtttacggaggctgtcgagacggaggatcttgatgtcactctgtggaatttattttcatcttcggcatcgggcttgcaaatgccccatgattttctatttgcatcttcttctgagcagattgtgggtgattgggtatgattatgatttcatttacggagctaccgaataaatctcaatattgtcttacctcttcgtatccatttcctccagttagtagtcaaaggaattgccaacatggaagatatcaaacaaatactgagaaatacgtgaaagcagaactgaataaggggcagtgctgtgactcagagtttctaagttgcgctgatcgaatccttcttgtatcgccgagccgatctatacaacgcgccaagaccttcagcatcaccgacccgattctgaaatataaaaaataaatatagatggaagacggatttgaatccaaatcaattgctattcagtcaaaatgccttcaatctcttacgctccattcttcttgctcttctcttcggccctctctttcaccccatgtccactcctcggccctgcattccctccgttttccctcgacacaaacgacaaaactgttgcaggggccctgcaaaagcttacacagaagtttgacaccctagtcgcaactaataatggcactcatggggatacctcgccaaacaccacctttagcatcgccttgttctcgtctgacgccgggaatgccgaagacgagcccttcttctggcaatatcatcacacagctcctatattgaaccagtctttggtaggatctcacactgcggacaaagacagcatttaccgcattggtggtctcactgaagtcttcactgtgtggagtcttcttcttgccggagacggagaccagatatttgatgatcctgttaccaagcacctccctgagctgattgataatactacaagggaacaagatatgaatggacgtgtaagatgggaggatgttactgttggtcagctcgcgagtcatatgtctggaattgtgagggactgtgagtaggacaccgaacagggcaaggttgttggttatcagagctaattcatgaatagattgctcgacggatgtgactttgcaaacaagttctgctgaggctggactacctccactccaggctatcagcataccttgctgtggtggtgattccaagtgtgatagcagtggtatgagattcaagtccgtgcctgctctctgtatactaatctctttatagatttcattcgacacctggccaaccaaactcgcgtggctccggctggggaaactccaatctattccaacatggcattccagcttctaggctacatagtagaaaagcgcacaggaaagcccttcagcaaagtcctacatcacatatttgacgtcctaggcatggccgaaacctcgatctttgcgccaaacagcaccactgcaggcatcattcccgtgagcaaagaagccagtggttggtcagcacacctcgaagcagacatagcgcaagttcatactctccccaccacatcccagtcaccaatctaacagtgcacccactgcagatcaaaatccattttctccagtgtcaaagatctcgcaacagccggccaagcaatcctaaactcaaccctactcagcaaaccccaaacaaatcgctggttcaagccagtctcccacacctctaacccggccaactccatcggatccccatgggtcatatacagtgccggctcataccccaacacatccatggtggacatctacacagttctcagcaacgaaggcaacgacaagagtctttacagctcatatctcggcctggtccctgatttcggcgtcggctttgccattctctcggccgatagcgacaccccagcagatctcaacgcgcacgcagatgatatcggtgatgtcgtgctaacagcgttgatggaaacggctaccgagcaggcagcccgcaatttcggtggcgaatacaaggtatccaatatcaattcgtctattgttgttgagtacgatagcttgcctggtttatatatccaggagtttgtcagtaatggtaccgactttcgtgcaacgctggctgggctcgtgggtgtcgcgaagccggcggatctgagtattcgattgtatcctacacagctggttgaggattctggatctggctccaagcaggggtttagagctgtctttcaggatgtgactgagttggcggatgctggaactgcgacttgtgtgtcgtggctagatattggaaggctccggtatggaggccatggcttggatgagttcatcttttctctggatcagagtggtcaggctgtcagtgttgagattccagctttgcgaatctcgttgcaaaagagctagctaagggctgatcttcttgcttgaagtctctttttttatgtgacatcacttttggagagccgtgccaccagacatcgaatatataaacgaagctattcggtttgctgaacctcaacttcctctgacttccttcgactagtaaagttcaagacatcatccaagcaagatatcatcatgcacgtgacccacgataaccttgctgacatacgcattgatggcccggggcctgagctcataaagcggctcaaataggaaagcccccctagggaaaaatccgtatacatcgaggtactttgtaggcgcgtactttgtacagaaacccccgtccacaatccaacatttcactcccttcaccatgccactgcgtctcacccgcgtcattcaaagcaaagtccccgctttcccccacgcgcggcaaccattcctccgcgtcccgccatcacacttcttctcctcctgcccctcagcgtcgatcaaaccttcccttgtacctagaaaatcaattctagccttccaagcccgcaatatgtcttccgcccctgctaagcgagagttcctctgcatcctgcccgataagcccggtgcgcaggcgaagcgtcttgaggttcgcccgtgagtcctctctagcatctagcttccagcgtgcgacgtactccgggatgatgagtctggctaatgcggtctttagtaaccacctcgagggcgttaagccacacgttgcgtccggcacaattgttgccgctggtatgtgacccatttcttcccttatgtagttagattgtggtatgggagcttctcaagcatttgtactgatatggattgtctcttgttcaggcgcaatgctcaatgctcaccccgccgatggcgagacaccctccttcaagggaagcatggtgatggctgttgcggagaatgaggcccaggtccttgagctgcttaacaatgatatctataccactactggtgtgtgggatatggagaaggcgcagattattccggtatgttaggcaggaagagtagaggattgtctggtttttttacctgctcattgctaacttgttttctggtttagttcaagtctgctgttcgtcaggctttgtaagttgcatgtctagtttagctttgcattggatctgggacttgacatttgtcgtttatattgaataaaaacaactggtcattgagcttgtgttgtgtctagatgcctttgggctatgtggggtggtctgttatacttttaagagcgcatagcttgatagatatagttggcttaatcagtgagaaagccgaggatagacacggttagcccggtacttttctatctgggcacggagtctccgtatggagtatggatatcccgattggaataagccgagcacaggaactatactccgattttatctccgaatgccagcgtgtatcatttcgatggaaccctggaatgtacggaatagtaatagcccgataaacgtagattgtattcgaatggtcgaagaatctaagaacaccaaaatgatgattgatcgcccagcgttgactttacgcctatcactcctatccactatttgatatcatcgcccaacaattggcccaaggcgaggcggaaaacaagacgttgaccgggcgagtccaccgcggagaacttcagtggtgcacaaaggtcgccaccccttggaactgatatcaccagcacgtactctcactggcacagagaaagaataccccaacttttctcatcccgcacatcattttaaatccagcgaagactgaggaagggaggaacggacgtcatctttgtcatctccgacgaccggcggatccggccaaaggaactaccccattaggcctagcgtgcttatctaagagccgatcagattatttatgaattcatcacttcctccctatcagatccatcttttttttgcctcccaacacatatcaccggtgcaaatcaatacccatattccatcaaatatacccatcataattcaattcaaaatgttcaagcgtttagtcactgttgctcctcgcgtcggctccgtcgcgacacgcagctctctttctcccctcactggcttgcagtccgctcaacccgccatccgccgtgctgctcctgccccagcccaacagcgcagaggatatcacgagaaggttctcgaccactacaacaacccccgcaatgttggctccatgcagaagggcgaccaggacgtgggtactggcctcgtcggtgcacccgcctgtggcgatgtcatgaagctgcagatccgcgtcaataaggactctggccgtatcgatgatgtcgtcttcaagacattcggttgtggtagtgctatcgcttcatccagttatctgacagagctcgttcgcggtatgaccctcgacgaggctggcaaggtcaagaataccgatgtggcgaaggagttgtgcctgcctcctgtcaagcgtatgtctctctttgatgcatttggttgattcacatgctaacttctctatcttagtgcactgctccatgctcgcagaggacgctatcaagtctgccattgccaactactacaccaagaaccccaacacccgtaccacagatctgtccgggacgggcggtgtcattcctgacgttaaggttgagactgtcaacagcccttctgcttccctttaaattcatttttgatttgatttgacggtgtgacgctctcggatggattctccatctgaatgacgcaaccccactcgttccgtttcacgaactctgcgatttttaattccgaggttgtcttaatacacaatcatttgatcaaggatgctgttgttttgtcggagagaatcgacaagaacgggtgtacttggagttcgttgtacttggtgtcgctgaaaatgtgtaccaagagatgacgatggatgagatgaaaacgaacaaattgaccatttgtttgatgtacatattttctttttttagtttcacgttctcatacgttgtgtcttgttctttttttttttttttctgcgatggcgcctcggggatccttgatcgatactctcatctctttcgaaaacagcgcgccttgatagtttccaatgaaacagtgaacccagaacagtcaccctctgtaaaagtagagtaatatcagaagcagtctatgattcatgatttatccacaatctatctatttgtacaagaccacactgggtctgcgagaacaccgcataacgaagccccaaacatagcacaatccacccttcaacaatatagccaagagctgaagaggccacatgcgaaaagaaatatagaacgccatcgctgatgcacagacagaccactcaagacaatccaatccgtgccaatgaaccaagggacaaaacaagggatataatggaataaagaagaaagacaccgagcgcaagccatccctcccaaaaaagaacattgtctaaacgctccggaggccgaagcgagacttcaaggacaacacagtctcataaaccgacaatttgacctcaacacgaaggtagctcgcgtaggcccacaggaagcggaagaagttgcggaagacaccgccagactcgttgatgagatctaactgctcttcgaaaacggttcgtgtggcatatcgcgcgaggatgaggaaagagcgcattgggccctggcgtgtgtgtaggttttcgtctaggctgcgagctggggaggggttagtcgatgataatccaaaagaagagagggtcgaaagcgaagtacatactaaggtcattggtcttcaagatgagaagaataatccgtggaacctggcctagcaagacaaccagctgttgtagcatgccctcacccaatgcaccagaaatatcatccttctctttagccgtccgcggggagacgacgctttccttcgtgataacgctgtagtctcgaccagtaatggcgctggcaaagagcggaaattgcttgtccgtgacgccggcgaccttgtatgcgaattcgcgcatccgtggcacgtccccatcgataacggctagccatagcttggcgtagttgcggcgcaggtcgcggtcgatgttgcggtagagcccgtggtcatagaggacgacgtcgaagttggggtgtgagcgggtgtggttcggacggatggcgatgttgccgccgtgaggatcacagtggagtggagcgttgtcgccgaagatcatttcgttgaagatgtgcgcgagggcggcggagacttcgtcacggtcgatgtggttggcatctagatacgccaggtcgtcggggcggtggcctgcaatgtactccatgacgaggatacgtctttgagaccacatcacttgaatctagttagcctcaggttacacatataaagacagagtcggcagcattacaaaccttcaggaatgaccagcggggcatcggtgtgctttttgaagtactcgctggcatgagtagcattctgggcttccatgcggaagtccagttcttgcggcagcgagaagtccatttccttagacaaccattccaggtcgtagtcagggaagaagcgcttcagcatggagaaagtgaatcgagtcaaagccaagtccagcggcacccattcgtccagcgcgggatgctgcactttaacagcgaccttctgtccagtttccttcaacgtagcaatgtgcacctgtgccagcgatgcagcaccgatgggcttctcttcaaaagaggcgaacaactcattcatactctgccctgtgtccttccggaacaactcgtcaattgactcaattgacgaaacggggcatcggtcctggagcgggatgaaggtcgaggtccattcgatgggaagcaggtagcccatgctgctgaggtgctggcccaatttgatgaaaatcgatccattcttttctaggacatggagtgtacgctcggcacatcgcttgtggcatgcgtgaatcagtgcgttatgttcttcgggggacaaggcggcttgtttgagggtaacacggtagctgcgaagatttgaggttgcgtcagcaattttgtcaaggcacagcatatagaaggcccacagggtccccacgcctcacttactcgttgatacagacagctagtgcgcctacaacgcgcccactgcgtttggccgcacccaacgcatgctgcgcttgatcggagaacgtcactgtgcccagaccgaggatacttccaatgataaaccactttatcatactccgctgcgatgcattcatattaggctcattttcggacttgtgctggctcttagcctccgcagacaagagaggcgaagccttgacagagaaagaacggctcgaagaggcgagggtcgagccgtgggaagacaccgagcgagtccatgacgaagtattgattctaccaaaggagggcgagtgtcgtagcagcgagttcgaggctagaagaaacgaggatccagatgtcgagggtttggatgtcaccgtagcgggatcaatcttgaatgtccgcaacgacacgcgaagcgctgcgctcatcccgaagcgaaggccaccggccagaaaaaaaccaaagaaaagaggaaatgactgatagtgcttgttggcgtttctgggctcaatccatcgtatgattctctgtcggctcagagagatttttcacggttctcgccgccaatcggcttcgatgctgcacgtgatccgatatagatcagcccataacagacgtcatagctaatttggcgtcgaatgcatttggacaaggcgtttgactggtagatctgatagtgaagcaagcatccaaacggattgtgaaggtgtatcgtaaaagaaacagagaaaatgggataaaaaccgtatatcaatggctggccttaagccgccaacaatacaatgatgcctatactatgtctatgagcctatgtcaagtacacttatgcaaattagaataattattgattcgaacaaaaaaaacatagactctatgtgcagcaaccagtgctcacataataacaagaagggttttacaaacagtaaaaccatgcaccatcactccaaagtccattttagagttgacaacgccgttgcctgagtatgaaccaggctaggatgacctagagaaattgaaacgtaataacacaaacatgtaaattcgcagtagaacctttggacgtcaaactacgtccactcaggctctgcgagtgttgggcggcggcgacgaggaatgattgaaggccgccgactcaggcttggagtcttgttgtcttcctcacgcagtaagtcaacgtgactcagtctattagagaggggccgtgttgacctgggcctgctagcgaccgcagagcttccattggcgacagatccaagaactggattgctgccatcccgactgccaggtctcatgaccagagaagaaacgctgagagagttgcgcgggtgtcggggagtatcccgaccttccaggtatccccttgactggccgcggttggctgagggtgtggatggggtagaggttgccgagaataagattggaggggtagtgcatgtgctttgtcgtcgggctgtcggtctgcgtttgctgacgccatacgcttcgctggatcgaaccagcttgcctgccatatcccttacgaggactgcggggtcgttttccatgttccgaatagcgtcgagaagaccataggttgcgagtagcccaccttgctcttcatttgaatcgcaaatactggctattatgcgcaaaaggttgagtcggacggcagctttggcgtgatgcagcttctgcctcagtctctggaagatatcaggccgcgcaaaagtggatgcgacaggaggactgagccgaagaagcttttgcagaggttcgagagtgttttcgaatgcgttagctttggaaagcttcaaacattccgcaatggcaccagtaaatgtaatggggccctcaaacgtatcactctcaaatatgccatccaagagatgctcttcaaccttggcggtttcttcttgaagcctaattattattcattgtcagctttgggaccagtcacgctttcagaacgggagacaaaccatgtaaaaatagcatccaaggcagtgacttgccaatatggatccaagagcaaagagatgtagaagcccaggcccttgttgcgccatagctccctacggccaacttttccagattgtgccatgtcgcagagaattggtagggcaaactcttttagcggccgctctgtaagtacgatcttttgcagaagcgggacaatgccgttcagtgcagcatcttcttgcctagacttgtttaggcggcacatattgtagatggtgttgaggatctggttcgagagctcgcggaaatgcgattttctcagatttgatcgaagcagatcggtcaagacatcgatggcgttggaattctggagcgaatctagagtagttgaaagcatcgacaggtttttgatgaatttcaacatcgtaatctgatggactgggctcattcgtctcaattctttcaagaccccttgaatcaattgttagcatagaacgttgcaagggttgttaggcggatgattcttactgtgcaagactgttcgttcagaaaccatctccttaacatgattctcggcctgcgagaatatgaagaagatattagcaatacgaccctcgataacttctgtcaactccccatcttcatcgagagcacgactgagaacaagagacaggggatcaaggacggagttgcgggataggattctacagaaatcgttcttgggagtggagccctaaagaaaatggttagatccgaggagatgcaaagtgcaatgaaggcgaagtacttacttgcagctcaaagacactccagattccgttcacaccaatcaagactagttcacgttcatcttcataatcatcctcgaggaactcgaccaggacattcaaacctccagcactgacgaacatctggagagtcaaggtagaagtctggtacatctgctgcacgaaagccgcagcctcgaggcgaatttcgcgggggtacttcttggatgcaaactcattgatgatagggattccaccgacgaagcaaaggttttcctggacctcatagtcatcgtagatgatcgcgttgacaaccctcaacagacagaggacaatatcacgccggcgagtagtgtcaagaatctcgagaattggcagcatgccgtgagcactgatgatgatgtttttagtctctgggaggtcacagaaaattgtgaacaattgatcagaaatctctgcaagaacctcttcgtcttgggatgttttgagagagtccacaagaccctcaacttggttgcgaagacgtgcgtatttatcgcgcgcaatattttcttcgaggtcgacctcatcaaagccttcttctaattgcgcaaaggggtcatcttcgtcttcttgatctcctagccaagagttggacagcttcgagttgagcatcaatgtactttgatctgaaccatcgtcgctctctgtcagatcaagggtagcttggtcggctccaagaatatcagagaagtcctcatcgttctcattctcagcaaacctctggatctcaatggtagagcggtcgcgcttcacagaaagctgtttgcgcagctggggatgctgaccaccaaaatcgtcatctacttggttgtatcctatgttttcatgaatgggtgatgatggatcatcctcggagtcctggaaaatgttagaataatacggtgaacttatagtcttgccggagactgtacctgataaacacccagctttcgatcgagtacatcctcattggccataatgagatctgaataatcatcgacagagttctctttatagagattggtcgcacgaggaggcggacgagtgcgtctcggcatcggattttgggagaggattgggacattttgcagtgcagaaatagggacattggatccgggctggtagaccgcagggctttgagacttggaaggctctactacattatgtttgatgggatatgggcgaattgtctgcaagtcgtcgtccgagaagcctgagttatcctcaaaggggtcagaactatcatccgatttgagtatggtcccatcgagtgaagcaaaagctttaagtctctcagaagagagcatgccaccgaagttatcatgtggccgtagatgcggcaacttgagtgcgctaggagagattgcagtagcaaagtcatcgtcccaattgtcatcccctgctgagacaggtgagcgaaagcgatccgtgggtttcatagaggttggcgatggcagggtgtcgaccaatgggttattccgggtagatggcaggcctgaagtactggggtggtctggtctctgcttcttctttgaagtccccgcttcgggggaccgcaaagcctcgttccattcttggacactcttgacggcttcttcatattctgtggactttttggggatcacagattcggttctgcgcgcatttacaatccaaggatgtttaagcaactttcttgctgagactcgaaggttggggtctttctggaaacattgcataaggaagtctttcacagcctagataaaagtcagtcttgcatgcatatgttgaaacgatcgataaagacgtaccggcgaggcaccctgcgaaaatggagggtgatcatcgtttacaatacgaaatagtgctggcataggctgcatgttatgatacgggggtttcccctcgagtagctcgatgacagtgcatcctaaactccagatatcggaagctgttgttgcgcctgaaagctcgattacctcaggggccatccagtacggtgtaccaaccacgcttgattcactcaagcccgtggtccgactcgccacaccaaaatctgcaagcttgacgagtccttcttttgtggttagaatgtttgcacccttgatgtctcggtgaataacaccctgttcatgcaagtagagtaaaccatgaagaacctgggacatataaagacccacaaggttctcggggaaacgaccaaagttcttcgcgatggaatgcaacgagccattttcgcaatatctataagacattaattctatgttcccttgaatttgacccgggagagacatactcgagaatgatattcagagtttcgacggatttcacaaatccatggtacttcacaatgttcgggtgctgcaagaatctatatcagtacggtgtttgttgacatagcttgacggggttgtctcacatcgagatttttgagaagatcgatttcaagctgttgcgtcgcatgttagcagatcagacgaactccgagaacgattagatcccataccatgataacgcgcaattcactcttgggaaggtctgtcaacttgatttgcttgacagcgacagtctccccagtattccaattcaacgcgcgatacacggagccgaaagctcctttgcctaagcagtctcccaattgctagcatcaacacccaatgtcagcatctgcccaatccatattttgcggggaaacagggcaccatattcatacgtagtccttgagctctgcaacatcttttgccgacgacttcaaaactttatcatccttcggtttctcttctcgcttcgtaggactcgttccgactcgtgtcaatcgcggctttatcggggttccgggggttctcgaggatggggtgagggggcgaggctgctgcccttcgctcccttcgccgggccgagcgaccatgatgcagcaagctaggatcaaatgtatcctagtatgtgttcgagttggctgtcggtctcacgatgtggtttgatggagggggtggggtgaaagctgaggaaggaggcaaccttagaagagctgatcgcaacggtctcagaggtcatgtccacaggatctggcaaacataattggcaattagtccgagtctatcaaggcacaaacaagcatcacaagagacgttcgcgtgcggtcgttgtggggaaagtctcaccaagtgcacattacagcacttcagctctcacgccctagagagctgtttccacgacaagtcgaggtgcatgtaaggtcttcagatggtagcaattaccatgcagaattctgaagaatagcgacctagtagaggtgacaatagaatgtgaaagagggttgttcgcaaagaatcgttgttgttttgaactttcgttctccacccgccgcatcatgcaggctgtgctggacaatcgccgatcagccctgccataccattttggtagatttttattatttgaccaaaaggatcacaatatcttgatgtatagctgtactttactaagaggaatgagaggtagaaaatgaaataacgcttgttgttgctgtggggttatttaccgctatagatcggggaaatccaatctgatctatacagggtatcatttttgggcacggagaaggcgcattacatctgaaacaaggtacaaactaccagcaataacaagaggacccccttgagactgctcactagcccaccgaagggcaggcagtaaatctccttcgaagctctggacttggccaatattttggatagcttcgatggaggaggcaagctctttggcgttagttggtcggacccagggcatcccgtccacgggaccaaattcggcggtggcgactcggtctccgggccggataatcgaaccaaaaaccccagctagatcctttccacttgacgcggcaacaacccaagtcacaggttggccttgaaaacgcattttgcggtccacatacttgccgagaacttcggcagattgagcattgtgggcaccatcaagcaggataggctctgcacggccaatcaaaggttggaggtcaattttttgcaaacggcctggccatgttacgtcggccagatatggaagcaacgagaatgcatccatctcaggtcgtagttgagaaagggcaagacgaagtgcggacactgcgcaacacatgttttcttgttggtgaggctctagatcaagcttctggaagtaagatgcaagtgccggaatttgttcggaaaccgttgcgggagagacaaacaaggaatcaatacccagttctcgaatgcgtgccctcacagtttcaatcacttccggactgtttgtattgtctaccacacaagggactccaggcttgaggattcccgccttctcacgggcaatctccctaattgttgttccaaggaaagcctggtggtccacccctatctttgtaatgaccgagacgagaacattattcaagatatttgttgcatccaggcggcctcccatacccacctcaaccacaccgacttcgacccgttcatggttgaatatctcgaacgccgttgcggtcaacaactcgaattcggaggcaccgatgcctagggtttgatctcgtagtctgacttggtcttcaatctgtcggaaaagggattctttgaccactttctctccaattgtaatacagtcccaccgatcaattaaatgcggggaggtgaagcggccacaacgcactccgccggtggacagcaaatgggaaaggtaggcactgatagatcctttcccgttggttccagcaatgtgaatggccttccatgagagcgtagtctgctgaagcagactcgcgacccgactcaatcccaactcaatcattcctccaagtgtgacgtgataggaatttcgaggtcaattgtcgaggtcaattgtcgaggtcaattgtcgaggtcaattgtcgaggtcaattcattatcgcccgaaggattagggagcgacaagatgattcaggatttcaatgcttcattgtcaataagtaaagcagagcccgaatgcgcgtagcccaccttccaaagtcggagcttaatcggaggaataaccccacgtgacattctcattcgcatacttccgatatgatgctctccgttctttactgacaatgggagaagtttttataatatccacccatttaccagttaactcaatcaagggcatttatacttattgattgtcaatcgagacattgcacgaataggctattgaaagatgtctagacaagtcacacgtgacctagccattctagccatcacaacctcaggcattcacaactctaaaaatccaatcgatctctcccgtctccatctcccatctccaccgttatcgcatgtcgcgtcctaattccataattgccttttcggtctttatttgtccttatttattaaacctctttgtttacctgcctttctttctgccccaaaagtaaaatgggtatcccgtaagtcatccattcctcacgtgggcgcgcgaagctatcgcatgcgccactgtttcgaggcataatgttgacttgatctacagtatgtggcgtgagcctcccaagtccgaagcattcaagtccacatcagaaaaggacacttctgctactgcacgctcatcgattcgccgagcaccgtcgcgaaacactagctcccgcgtgcgccgtgccgatatcctggcttcgtttcattcacagatcattgatgagctccgacgcggcgccgtggaacctagacgtgtgccgcgcttttctttcattgcgccgaacgggaatgtcgacaatgcagtggctgtggaaccggccgatcgtgtggccctcagcagctgggctcggtcggaagccgcaagtacaaaccgacagacagatacaacagtagccaatcagctgttcagaaatcatcgcgatcaagccttggccgagcttttcggtcgcatggacggtcagcccggtaacaccaatgccggtccttcattgactcccaacttcgctcccgctatcgcataccacaccagcgcttcgtcgactccttcggacagcggccttcgtctcccccctatgcgtgagagatacaacagtgatcgcacctctaatacctcattcccacccgagatccctgaataccggtctaacaatacacaaacccggccaaaccgagaccccgtcgtagacgggcttggggatcgccaacgcagtcccagtccagacgaagagcgggaaagcgttgtgtgggagactttactctcaaccattgcacccgatgagactcttccatcaactaatacttctttcacttcaacttctgctgccgttccagatatttcgcgcaaccctcgtcctcgcagctctgtcaacttgacgcagccgatgaccgcggaagctgctcgtactcacttcggacttgacccttatcctgaccaactcaatccttgcgacttctcttccgatgatgaggaacctccctctactctccaggaattcattggacgacgacgggcaggccgttatcctgatcagcattcgactatgagcaaccatcctcctgttcctatccctacaatcatccctgcaagcgttcttgctctctctgacgcgcgccgccaaaattcctctctctccgatcgtcaccagaacgatgacctccaccacatgcaggtcatcctggaccgacttgctcgtcgtgaggatattcccgacgactggtgggctgcggctggcctcgcacgcactctcgaccgtggttccagtgcgagcatggactccactgacaccgagggcgcatcccgaaccaaccgcgacaattgaacactgctagtcatgtggtgatgctgaatgatacgagatttgatattggcgatattggaaatgggcgttttccggcggatctcacgggtttttaatttgaatatcggcgttgacaggtcctttcgaggctgctttgtaatcttacattttccggtttccttgtcgattattggacaaacggacacgaacggccacctcgggggtcttttcaatattatctgtcctcaacttttcccttctgtaactttttatatcttcggggattctgattcttccactgtccagacataaatagaacatatttactttcggtgcctgccaagtccagtgacgtatatctctcggagtacagcagtccccacttggagagccccgccaatatgtgaggtcgggggaaattatgcttagtccaacaactcaaagaggcaaataacatacaaagtagttagatccagtgtcaaaaattgccttgtacactgatctgcaacactcaagcgtactacaacacgttgctcaaaccaattcagggcgttccttccctcggatatttcttatcatacacatttgatcccagcgtgaccactagccaactatggatcaacaggtagaccgactggtcaacaagacctggggtgagtagatccaagaacaagcacaagctcgaattactcctgctatcccaccccaccatcaacgctacaaccacgtccaactaacaacccatcccagcaaaactctgctcaacagcagacgacgcgcgcctaatgatcgccatcagcgggattccaggatctggcaagacaggtctagcaacgatgatggcagcgcggattaacaaaatctacgcctcggaaaaccccacaatgccaacaccaatagccatcgccctcccaatggacgggtaccacctgacacgcgcacagctagccgccatgccggacccggtgaatgcggcagcacgacgaggtgcggcgtttactttcgacggcaagaaattcctcgagcttgtgcaggctctgcgagagccgcttacgggccggacgggaagtctctatgcgccgagctttgaccatgctattaaggatccggttgatggggatattgccatcccggcgagttgtcgagtgctgttttttgaggggaattatcttagcttggatcaggagccgtggaaaacggctgcttcgttgatggatgagctttggtttgtggatgttgattttgaggttgcgaggaagaggttggtggttaggcatgttaaggcggggattgcgagggatgaggttgaggcggataagagggctagagagaatgacttggttaatgggagggagattgtggatcataggttgccggtgcaggaggttgtttctagtatttttgatcctgtttgggagaaatgggcaatgtgatcttgacgaaggctatgatgtacagagttattactatgttgatttgagtatccttgtgttattaggaattcaaaacacgtccagcgactatatccttggcataggaaatagctcggacggattctgtgaatttgtgaaggacaaaaagtccgatagaaagatgatagcaaagtgggttttaaagtcgtactagactttctcatagagacatactcggtccctacgatgtatacatatcgatatgctctacagattgcatattttgaagtagtagtaacacactagctgtttcgcgagatcgatatccacccatcttggtctatagttatcgagatactagctctataacccccagcactagcgtaagtgaaacccttcttaactcgacgtttagatactgatggatcccggcttctcctatcatgacgccgatttgactatgtggtttctagcccatggagcaaaccctaaccagcgatgtggtaaagatcgcaccacactgtctaccgcttttcaagttgccagcttcgagatcattcagaagcttcttgaacacggtgtcgatgtattccaaggccaggtgctgcattatgcggcaagacgccgattggatgatcgactccaagttctcgatttcctccttgagaaaggtctaccgatcaacaacatcatgtttctgtactccgatgactattacgccaatatgtttgacggtattggtactccgcttcattatgcggctgatgcgggtctacttgacctgtcaaatatctggttgagagaggagcgtcagcaagaatccgagatcccgcaggacgaatcgctctcaactgggccgaattcaacaaccacaaggccgtaactgattttttcgtccattgtctgttgagaatgaccaacatctcgttgcacaatttacagatgaacctgggcgccactttacccttaatggaggaattcatggcaaaaaacgactactacttcgttaacatttagttacatgatttttcggggtttcttgaactcgttatagttgaatagtccgatatatgttcattctactatgacagccgatcgtctgacacacaggcgcactggttatccggatatatgttgtagtatatcatcatccgcagtacactcccgcaaaaggaacatcatcaaggcggcaaaatgacatcctcatcttatcaccacctcccatcatcgaccagagatcgaagagggtatatatccaacatttcatctaccccggaaatttgtcatactgatccacaatcgggcatgcttcaagaacctttacacatcgaagctctttatcggaataatccaggcttccatcttcaagggtctcgattggtgcacctttcagcgtttgcagagattcttcattgataatcatgcacattcgccatttggtccaaccgtcacgcatgccttgagtgtccacccaggcctcaaataagcacgaattgcctcaagagacgccccgttaaattgcgccggattttgcaagatggtcgaccggtgtttggcccagatttcattaggctcatttggtggatattctttggtttcttggaagaatccttgcttgaaacaggcctcaataaaccgaatagcgtctggaaatagagtatctgaatcagcggagtaggtagtgcgatatatgacaaatccccagtctgggtaagtgccgaggttatctcggagctcgtccatgttgaattaattgttttaatcgcgattgcgtagaatttgagttggtggttgaggaggaaagagatgaggaagggaaagaaagtctggagtcttctgccaaattgtcgttacagctccccaaccacgaacccacatcaccaggcttgggacctgctagatctgttacatggttggcttcgtggcactcgatatgtgtctagcttggacagcgaaccacacaggccaggagaaaatgatccgtctgtatcaagcatgaagaaataactatatctatcctatattccggcactttatcctagctgcagacattatagattgtactcagagtggtgtgcacgagcaagagagagaatagatcactggcgtatggaactcaggatcgagaacctggaaccgtccctatggggatcagctgtcgaagtccatataccaaaagtaaaaagggtacaggtcagacatgtgaaaagaattagttcgatgaacaagcacagcgactactttaattaagagaaagagtccaaacgcaaacagcgtgtcttaccccacaaagaaatggcaaaaaaggacattcccatccagtgcctggggttatactcccaggtcgccacttaggggatcataatgcttaagtaaccccaaccagctttaccctaagatctagtcgtccccaactgcaggcacacattgtcggacctccacagcgcgcgtatcgatctcgcgcgctccagcgggtccagaccggtaccagcaaggtgggcaattaggggagcataattggaacatttatgaccgtgcactgggtgggtcgaacgctggcagctaggacctaaactagcattgaaaacgcatgtcaacacactcagccactgggggaatgtcggttagggggaaggtgttgctatgaaatatataggaacaaacacttcctaaaggggaaggtgggtccgctccaccacattgcttatcacgtgatgatgtctgaatgtactatgaagaatgaatccttgtaatatacatcgtttaatccaaaaaggtatagacctacacataatgaaatcgtggaatggtaaagcgaagtggccgctctacttttcacttctccctcacttgaccttttctccttctctcacttgaccttttctccttcttctcgccttctcatcttctgttgggtgcccgaactttcaacttttaggacgagtccggtatcctcctcataaccggcgaggcgtcctttccacgcccttggtgcggccttattgatcatcctgggccttttcctcattcagagatacctccctcgcgcgtatcaataccctttcatacacctcttagtcttcgactgaagggaagcgagaaccggtgaacaaggatgggaaccgtctcaacacctcttactttatatatgcctcgagtgcataaagcagatacctggaagttcctgcgcaacttagacagcgttggtctgaacttgaacctgaacctgaaaatcgtcgaataccttcaagaacacctcaccatggtttctctcctgatctaccagctttttaccccgagctattgacctctggggatccccggtgtaccagaagcttaacccacacttcgaagcccccggctataatgaataaggtccttcgatctaagaatgactttctgactgattaccaagaagcttccatgagacagagctggttttttcctcgggaccacacatcggttttcttcgcctattgtcgaaaatattatgcacacaatgatcttgactgtttcgaccagtcatatatctagtatcggcgttgatggatgctagtattttcgcgattattgagtttatggatttaaggctggcttcaatcaatgtgagggagcatattacatagcttacataagctctaggtggttacaccgagagcgtacagtcatgtttcatgagtatttgcaccccagtacttcggggggggggggggccttnnnnnnnnnnnnnnnnnnnnnnnnnnnnnnnnnnnnnnnnnnnnnnnnnnnnnnnnnnnnnnnnnnnnnnnnnnnnnnnnnnnnnnnnnnnnnnnnnnnnnnnnnnnnnnnnnnnnnnnnnnnnnnnnnnnnnnnnnnnnnnnnnnnnnnnnnnnnnnnnnnnnnnnnnnnnnnnnnnnnnnnnnnnnnnnnnnnnnnnnnnnnnnnnnnnnnnnnnnnnnnnnnnnnnnnnnnnnnnnnnnnnnnnnnnnnnnnnnnnnnnnnnnnnnnnnnnnnnnnnnnnnnnnnnnnnnnnnnnnnnnnnnnnnnnnnnnnnnnnnnnnnnnnnnnnnnnnnnnnnnnnnnnnnnnnnnnnnnnnnnnnnnnnnnnnnnnnnnnnnnnnnnnnnnnnnnnnnnnnnnnnnnnnnnnnnnnnnnnnnnnnnnnnnnnnnnnnnnnnnnnnnnnnnnnnnnnnnnnnnnnnttcttgcttacttgcttgcttacttgcttgcttacttgcttacttgcttacttgcttgcttacttgcttacttgcttgcttacctacttagttacttgcttacttgcttgcttacttgcttaaatggcctgcagccggcatagtggctataccgcggtttaattatttaattatttaattggttgattgtttacttggttaaagggtggctacgcaatggccgcctaatttagggtaacgtaattcccggccgagctgcgcagcccagaacacatacagtcatgtttcatgagtatttgcaccctagtacttcgggggggggccctattttctgccggaaaaacttcgtactcactcccagccagtcgcactatgcgggtggctcctataataataggaataggcaggcggtattcacagagcggtcaatggtagaggtaccggggtacaaatactcatgcaacgccactgtagacaacatcaataacaagcatctttaccaccaccaagctttttccataacagattggtagcatgtccaggccttgacatacccgcgcaagatgccgacattctacagctagtcccatgggcggcaatgtacggtatcattgactctttcgggaatgaaaatgtccgccgacgcaagcgcgcgcgccgagagaaggagcgccatgataattctatatctaatacacacattccgtcctggagaagggtcgccatatcgaagcccctctctggcccgctacaaaatacagagctgcgcttccgtatcagtcagattgacagtgccccagacgtcgtcggtcctgttatatccctcctgctggcagtagaggccttgtttcagaacgtcggtggctctaggaggctggaacgtattgcctctctaggccacgccggcctcgtcgacttccgcgcgcgtttcgtcgagggagacccccgcgttacccgcgctatgcgtgaggggctcggcacctcactgaacgccatccgcgacgccatagcatttgctgagggcctgctgctagttgaccgatgcattgagatggtaaaggatgatgccgtaaggcttgaggtcgaagccatagcatccatgatgcgacctccaccggaaactcctttgcacgaaggccacttgatttctaactgaggctgccgaggacggcagcaccctttccgaagggggcacatgtgagagagcatattacatagcttacataagctctagttggttacacctagagcgtagacaacatcaacaagcatctttatcaccaccaagctttttccataacaatcaataacgcctgtgtgcggatcgggaggtttaccagagaggccgtgaatggttcaaaacaattggcaagcgagttcggaagtcacttttcccacggagaaaggatagaacaagagattcaacttcttatgagaatgccactatggtttagctctcgctaagtttgctgttatcattaccattcttcgacactttcgcggctttttgaccacattctgggattgtctcttgcttgatttcgtggctttctccgtgagtgagacctgtatcctatgttctgtggctaaatatactgtgcttacatttgatgcacgtagttggtcttgagatgcttcgcctcccttcctccgaggaagtttatacgggcatgtcacgaccagagccgggaaaaccccggataagcacatcaattctcgaatgtgataacccttggctgtctataactccaagagtatataatttgttacactcgaggtaactatgggtaactgaggttattaatagagctcgaatcctctaatccccatctggatccgccatctaagacatataaaattagtgggaaaaaaaagaggaaaactctcatcttatgtagaaccgtacagaataccattaaatgaatattttcaaattttacctcgagcaccactgtcattgatacgctcacaccgtaagaggaacggaggcgcttctctcctgtatccggggacaggtccctgacgctaaacctctttgggagccgaagttccacaagccatggggaactagtatacggtacgaagagaaccgtattgtaaagtacacttagtattgaacacccgcaatgaagtacattactgtacagatatgaatgtaatataacagaccctgacccccatcgtggctttgagattgtgatgaaactgtggttgcccgatttccccttcccccccgttttcctctggttgagaccttatcctccttaccacttcgtcactctttgtcttccactttcccacactctttacagtcgctctttagcccacacgttcttttactctagactcgctgtgcgatcttgaatccaatcccttatccaatttccaatttgtgatttcgatctccgacctctaatctttcaccatgctcttcaacaagtctatcttcgccgtggccattgtggctttggctaatgttgtgactgccaccaccgtgcaaaccccggcctgtgttctcaaaatcatcgggtatgtcccgaaggaatggaaggaatgctagtggagtcctgagctgatgacatctagcaaccaagccaacccggccgattcgaagactatctgcggctcgagcgctagcaagatccagtctgatatttccaagaactgtgccgatagccaggcttccctgaaattcttcgtcaacaactgcgccctgctcggccacaaagttggtaaggatcgacacatccaagagcatgttgcactatatcactgaatcggttacttattatcttctctttagtggctgatgtttccaccactactggcacctctgatatctctactgccaccggcactgctgggggctctacagccaccggcttcgtcaccgctgtctcctctgtctctgctaccaagactggtgcttccgttgctactggcactgcctccaaccctgctactggtacctcggcgatcagcactggcaccgcctccgagtctggtgtcgtcgcgtccgcttctccgactttcaacgccgctgcgtccgaccgccacttctccgccaccagctttgttgccgtggtgttcctcggcgctgctgctttgctgtaagaattcagcattaactgacagcggctcaacgtgaatatcgatgtgagcatattattagccttaattttgctcctttcgatctgaattgaatcgttgttcagggatcttgttcgaattctgatatgttgctcgtctatgtcaatatttgaactccgtgaacttttatcttcttacttgccaaaatcgcattgatttatgtgctattcacttccccagaacaattcttgaaaccgccgaggtctgctcaattgccaatcagtcggtcgatgtaaacagattcaaatgaatcagtgaccaaaatgccaggacattccctaatagaagagaacgagcaatacggagtacatccgaagtactcctgcggtcatccccgcacctcttggccccttgattaaaaggacgatgtagatctatcacattgacgtgtacaatgcggcaaggctccaaggttgggatcgggcatgatgttgactaagacatatggataaatatcacgctgtcaaaaatcacctcaatttcgtaatgacgtttaaagatcatctgagccggaatgcttcaggccgctcggcgacagctcttccgttgccatgttgccatgcgcgatccttcgcgtgttcacgtgaccattcgcgatctgcagtttggctgcaaacctaatctcaccgcctattctctagtcacaccgccttccctattctaactagaaaccccacgctaaggccattcggatcaagacgctaactgcaaatggtataaatggatgtttctgcctggcaggatgcaggtttgcaaggaaaggtggacccgatcttggtaagctgaaaaaacgcgggcaacgcgaaaagacaacgcgtccactcggcaaccaaagattcctctgcccctctgatctctttcttcttctcacacccctctacgggcttcatacattcatctttccccctttctctatattctaatagcatctcaatcctcctactactttgactttgataccctgttctcgtctttctattatttcaactaccaacttatcactattcaaaatgtttgtctacaagagaggtaagtgcatatatggtcttctgatacacggaagcattcgtggcaagagatagcttctgctccttcatctcgccacagctacctggctttgccacgccactgtttttggatcgacggctaacgcggatacaaactgcagatggacgcaaggaacgcgtgcagttcgacaagatcaccgcacgtgtctcgaggctctgttatggcctcgaccccgagcacgttgatgccgcagccatcacccagaaggtcatctctggtgtctaccagggtgttggcaccgtggagctggacaacttggtatgttcacttgcttgccccgacttatggcattatgttaatgtttcaatcctaggctgctgagactgctgcatacatgaccgttacacaccccgactacgccattctggctgcacgtatcgccgtttccaacctccacaagcaaacaaaaaagcaattctccatggtcatctccgatctctaccattatgtcaaccccaaaaacaataagcccgctcctatgatctcagatgaacactacgagatcgttatgaagcatgccgaggagctcaactcggctattgtgtacgaccgtgacttcaactacaactacttcggatttaagaccctcgagcggtcataccttcttcggattaacggcaatgttgctgagcgtcctcagcacttgctgatgcgtgttgctgtcggaattcacggcgaggacattgagaaggccattgagacataccacttgatgtcccaaaagtacttcactcacgcctcccccactctgttcaatgccgctactccccaaccccagctcgcatcttgcttcctggttgacgtgagcgcagacagcattgagggtatttatgatactctcaagacctgtgccatgatctccaagaccgctggtggtatcggtctcaatgtccaccgcattcgcgctaccggttcttacattgctggaaccaacggctcctccaacggtattgttcctatgctgcgtgtgtttaacaacaccgcacgttatgtggaccagggtggtaacaagcgccccggtgcctttgccatctacctggagccgtggcacgccgatgtcttcgagttcctcgatctgcgcaagaatcacggtaaggaggaggttcgcgctcgtgaccttttctacgctctgtggacccccgatctcttcatgaagcgcgtcgaggccaacggtgactggacgctcttctgccccaatgaggcccctggcctagctgatgtctacggtgatgagttcgaggctctctacgccaagtacgagcaggagggccgtggccgcaagaccatcaaggctcagaagctctggtacgccattctcgaggcccagactgagactggtaaccccttcatgctctacaaggatgcttgcaacaagaagagtaaccagaagaacctgggtactattcgcagctctaacctgtgcactgagattatcgagtacagtgcccctgatgaggtggctgtttgcaacctggcttctctcgccctccccacctatgtcgactctgcgcgaggcgagtatgatttcggcaagctccacgaggtcgtccaggttctcgtgcacaatctgaacaagatcattgatatcaactactaccccgttcctgaggcgaagaagagcaacttccgtcaccgccccatcgctctcggtgtcaacggtcttgctgatgctttcctggctctgcgtctgccgttcgactctcccgaggccagacaactcaacatccagatcttcgagaccatctaccacggtgccttgactgcttccgccgagattgccaagaagctgggtccctatgagacttaccctggctctcccgtctcgcagggcatcctgcagtacgacatgtgggaccgcacccctaccgatctctgggactgggcctccctgaaggccaagattgccgagactggtgtccgcaacagtctgttggttgcccccatgcctactgccagtaccagtcaaattctgggcttcaatgagtgcttcgagccttacacctcgaacatctactcccgccgtgttctggctggtgagttccagatcgtcaacccttggctcctgaaggatctggtcgacctcggcctgtggtccgacaacatgaagaaccgtatcatcgccgatggcggctccgtccagaacatccctaacatccccgccgatatcaaggccctgtacaagaccgtttgggagatctcccagcgcaacattctacagatggccgccgatcgcggtgccttcatcgatcagtcgcagtccctcaacatccacttgaaggagcccaccatgggcaagctgaccagcatgcacttcgccggctggaagatgggtttgaagaccggcatgtactacctgcgtaccatggccgcctccgcccccatccagttcaccgttgatcaggagcagctcctggtcgaggacaccaacatcgctcgctctaagaagcgtactggtgctgccggtgcctccgtttactcggctattccccgtaccaatggtgctgagcccgctatcgccaaggccgtcgcccctgtcgaggaaacccctcgcagtgtggctgcacctgctgtttctgctcctactgccgtggagaccgatgaagttgctgaagctgagcctgaagatgccgaaagtagggcaaaggagggcgatatattctcagatgcggttcttcagtgcagcatcgagaacaaggatgcctgcatcatgtgccagggttaagctttctttccctttaatgcttttggatgtttccttggggctttgtatatggccatgtcttctttcctggcttctcacgtgtactcattatgattttgatggacttttctttttctttgcgtgtttcggcgtcggttcaagatatttcctggattttcttattattacttcaataacgtgttagttatgttcttcattcttctttgtaaactttagtacggagtaggccaagtagatattccttgttgtacaggactagtctcagccttgtatattcaaaccctattatctcattcctaattttaaattgcttaaacttggctgattatttgagtagagctgtgaaagtagaactctcaaatgtcgtttggatgtctaccttgaggcaaagaagagatgatcgagtacctactattggtaacttacttgcaagaatccagccttattgtatataccatacgatttgtcccactataaactgtttatagttatatttacaagcaaggctatagagaacaacaactatgctatcttcaacccattgagtaaacacatatcaacactcccgcccattagatgatctatcttcgtataggccataacatagccgtatcacaacgcataccacccgcgcttcctttcaccgatatggccggtgaggtaactcagcaagatgaggggtcaagctccctccatgcacctctttaggcggtgatggcgggacattatgaaccacccaagggtgtattgtttccggagatatcgttttgccattggagtttcgtatcttaaagtagagcagcacacccaaaatgcatagtatcgggagaccaactccgattccgattccgattgcgatcttttcggtcatggctaactgggatgtttggccagaggctgagatcgacagagacgataaggatgacgatgacggtgaggaggagagcttgatggtcgtatgtggcgtatttgtcgacgcggacgcagatgcagatgtggatgttgttgaagacgcagtagtgctggtagtggcgacaggctcggtgacgttgaagtatgtggaaacaaatccacccttctcatctgggttgatccagagaaagaagacgtttgagtacgacagatcaaatccgtacacctgaacaacccacgtgaagttggtgacatagtcggtggaatgtattttggctagaagacgtgtcaatcaatcatcccgtattttgcagccttgggagtaagtaagtgtcgggaaactaacagaaaatatttccctggctggcggcacctgtctctaccaagctttgctgccagatagagacgttgaatacctcaagcgtggtcttccatgagacaactagcttgtcacctagtgtgaagactggattcacgccagtgttggaggctggatttgtgaaataattgtaatcgtcacctccagccacgagagaagcgacacctgcgaggagcaatatgagaaatctgggatgacgcatgacgaagcgagccacaaggtcaagtctgagaatcgatggggacccgggaattggcggttatagttgatgatatatgagtctcgcgctggtgggctggggggggnnnnnnnnnnnnnnnnnnnnnnnnnnnnnnnnnnnnnnnnnnnnnnnnnnnnnnnnnnnnnnnnnnnnnnnnnnnnnnnnnnnnnnnnnnnnnnnnnnnnnnnnnnnnnnnnnnnnnnnnnnnnnnnnnnnnnnnnnnnnnnnnnnnnnnnnnggggggaatcgaatcatactgaaaaacacacggtccccccagccagagcaggggtgtagatattatgaagaggctaacatgtctctgcattcatctcgtatcgtcgaacggtgagttggttgttttttaagcgccctgagggcaccgggtcgaatttgtgggcaggggctaaggcaagaggccgatgaacggtgcaataagatcccactgattgtttgagtcaagttggatctaactgtatctgtgatcgactcacgctaaagtgacggagaaggcacccgatcagtctatcacggcaaggatagctcggaagattacgattccgaatcgagaatgattgtgaaaacagtaccatgtggatggtacggagtagatggcttctgatgaacaccattaaaactgcctaaaggtattggagtgggccacagtgggctttgggtgccaattcataaaaacctggtgatggtgccagaattagaataggataacgtactttgtttccagctagacgctcagaaacgccaccttgttacatctgatgccccttgggctgaatttcgaaatattccatccttttgttcgtacacggaggagcatactctaagaatgattcccaaatacgtatttagtgccagattgcagagaattcaaaatccacagtctatttcgtacagagtaatgcgttgctattcagtttctctcccattgactagttcctgggctgagggacgtaaacagcccccttttccatcgtgatctcttcaggaataacatccaacacatccacgtcgtcccatgttgcatgaacggtccgttcccccttcaggatacggttgatattaagcattgtgctgtacttcaccccccagctaaaaaagccctctccgtcgccggtctcttcgtggatatcggaggactttgctctcgatcctgcctgatggaagccccccgtgatcgatgggtaaggtgcaaagcaccgcaaaaaaccattaccacacatgcgtccgagcgagacgtcaaactgcgcaccaatgtcaatttcttccgcaagaccagacggatttaccgacagcgccgcgaggatccgttgcgcaccgcggtagctcacagcatagaacattgagcaggcggcgtcgtttgctgtgcacgtaagtcgactgtgatcgggtcgctcgtggccctcgaagaccggagggtcgcgccacagggggagaaagcgatggggcattgggatggtcggatcattcggtgtaaggtagaatggcagatcagtcttacatgacacgccgcagtggcctagccagaggatgtcccagtcgtcgccgtatggcgactgagttgggactttccggttatgtcgaagctggagctggagggttcggacggcgtgagcgaagctctgtagctgcactttgattgagacatcccagtcggcatcgtcttccatgataatcgcactcgctaatctctcctggacaattctaggggatcattaggcgtagtcaaatattgcagtgtcaactacataccgctggagtccgttgatatgcgcccgtcgagcagcgtactcggtcggtttatggccatggtcccagttctgaaacagtcagtcatcgtgcgtagtgtgtaactctagaaagcatacatatggatatgatttagcatctatttcacctggagtcacgccgtcaatccaatcgacgtggaaattgctgacggaagagcctaggacgatattgtcccgcttgtcaggccggctgacaaggttgatggcgaagactttttgaaactaaatagtcgtgagccgaggtatcattaggtgcagctcgaagtgggataatcaccccaagggtttcgtttccgatggcatcgaagttatcccaatcatgatagttgctccagacctgctgggtaggggcgtccgcgccgtgaatgctctctcgtaggttgaaaaggatgaaggcaactccgaatgcgaccagaaggagctgtacaaagcgtaatcggaatgcagaaaagaccatgctcgatcgtcatcgggagacaagataggacgcgttgaatatcccgagcgtgatggaggcgaccgtgatttctgttttcccccagagccgccgaaggtgaatatgtgggctggttatcgacaggggagggagagactagcccttctaatacataaggcgtattgccgaagcatggttggtcgagatattcgttggatccccactgtgatggacttgactagccgcatgaactcgggatttgagggcacatgagtggtatacaaagcgacagtggcgtaccccggtccatgcgctggcagcattattagtactaaatacggagtagacgttaagaatgattgacatggagagcaccgatttaccctgatggccgcgtgggtccaatgatcggcccagaattaccgctggcccccgctgcggcaaagggtcaaattcgatgatgcttagtaatacatatatattttcaccgccggagtttccgtcttgaatattttaaaagtcacctgatctatcaccatgaagcaatttaaattaatccaactaccaccaataatagagataatttgattccgaaaaacctagttgaataccgcctaacggagggactttaattgctcaaatgcgaccgatatttagtcctagtgatagcccaattgcttcgagaggtagtggatcaggtgacatggatattacggtcgcagatcaggtgatctctaaatagttgactagttagatcaggtcaattaaatctacggagtaagcctccccccaacctagcttatccacgttgtatacatgtacgttgctttttggtgaaaccgagtacatattgttgttccatcaacgaagattctacgattcgcgtggcagaaagaaaccgccctgcaggtgcgaatcgacggatttgtaatcatgcaaagtgcccaggtgcaactagccctaacgcccaagcgcgcaaaacgggccacgaaaaggaggctgacacctatattgtaggcagcacctttattttatgaacgagaaaggaatagattcaaaacgtatttcaatatgactctcgggcagcacgccatacgtaatccgccgtcactgcggagtacagctgcagttctactccgcacctcaaattcttcaagtctccagtttcattgccatacggagtatgccgtctaacaatcctattccggggatgtcttcggtcgagtggagcagaggggactggacaaagtggaatggaatagtacggagtatggatgccaaccaaatctccgagttcataccgttggtgccacagggtctaggtccatggttgggcctggaatgtacacggaacaggtattggatgtgtagtcagaactctaggtcattttgattgctcatggtaacatagtcagcaccctgatcgggttgttggtattgattatgcaggttctgttggacaatacaagattattgccctgtgccctgattagggctgagctggaagtgagtctagacaagatcgatagctagagccaagtccatgtattcacacaataatctaagatcggcactattctctcactaaaaactaaaactcgaaagcccagaccagcagtggaggattccaggttaaaggattagattacgtgtataagaatggtatgcaaatgaaatctgccccagtctcagctcagctttgtctcacgcattgtccaatcgaatcggtattggcgcccccgggtcaatacaatacacgtcagactgttaaaaggctgcagtacatgtgtattctgaccagtcctccctggggtgcattgcgaccgtggaaatcaggatacacgtcattttcaaggcgaccgaagagatctgaataataacctttgtgaatccgcaccgtggaagagagcggatatggtatccccctaagaaacttcggaagaaacttagaaaagaaagaaaacgggtgctgtctctgattggcccagtagtcaggtacgagaggcaaaatatgtgggtcgtctgaccccagtaggcagtaggctcgtagcatcggttgaaacagccgtcggtctatccccagaggagattagggccaggagaaaaatggcttatgtggcgcacaagcccctcgtctctggttttcgttccaatgaggatctaccggggcatccggctcgggtactagggaagttagaattgtgatactgtcctccgtcctccgtgtgtagtgtccgatgcaggatatgaggacgacggagaagaatgaaagaaagtgagttgtccatggtacgatcgtggcttgatttggaccatgggttcaggcgataggtgggtccgctagtaacctttgaggtgggccagttttcctctttggtgccctaccgggggcattttataaagtcgagacccttccccccgttttctttcttccttcagtccattccttccttcccgctcactcacgttcctttcgagtgcccgaatcttcctgctgtgcagttgaatcaatcctttaaacaacttcacacaatacactccctcgagtctcttccttcacaatggctcctatcaccaagactctcgccctcgctggcgctttcttcgccttgactggctactcggctcccgtcgccaaacgcgccgtcgtttgggagaccgtcaccgatgtcgtttggaccaccatcgatgtgaccaccaccatctaccctcagtccactaccagtgctgtcgtgcctgtggttgccaccgccgtccctaccactaccgctgttcctgctcctgttgttgtagcgtccaccaaagagcaggaggctgcacccgttaccacctcgaccacctcctccgtcgctaccaccactgctgccgctgttcctactgtggcccctgtcaaggaggaggctgcgcccaccacctcgtccaccactactgctgccgttgtccctaccgttgaggccagtgttcaggaggctgcaccaaccaccacctcctccactgtccccactaccactgccgctccccttgctatcaccctggaggccgatgcctactccgctcccactaccactgcagcggctgagacatcttccaccgctgcctctactgctacccgtgctgccagcgtcgatgttagcagcagcggcggcgcttgctctgaaggctccccttgcgacggtgacatcaccttctacgacactgccaccacttccaccaaccccagctcctgcggcaccaccaacgatggtaccgtcgagaacgttctcgccctgcctcacggtatcatgaccgacagcgactgcggcaagaccgtcaccatcacatacaatggccagaccgctaccggtactgtggtcgacaagtgcatgggttgcgacaacaactccgtcgatctgtcccgtcacttcttcggcgagctggcccccatggacaagggccgtgtttccggtgccaagtggtacatcaactaaacgttgcgtcgaccgcgcgttggtgttgatggccaccattatgaatatgaacaatggacacatctctggtagattgcgcacacggatatggtcttgacgactcttccttttttttcccccttcttctcacttcactgtgatcttttttccccttctttcccggtctctccgagaatcaatcattcatcactcggagagactgggcctttttacctttcgtccactctcttgaccctggatctttttttacgatttcatgtgtccctagtggaccgcattcatattttccccattttcatgttcatagaatcttcttctcttcggagtcttcttgtgcaataccaccctatgatggaccccattcggccatatcacatatccttacgatccctgcgcgcatgctggcaagtcatggacggtttgattctcttgacgagacctcgaacatgcacatgcgacaggcaatgatgattacgatgatcacgctcgtgaaacaaaaaaaaggcatattgcaggagacggatcattgaatgaaacttgtttcgtttgactcgtgtttgctttactgcgtattcgtagtttccaggtatcatttggggagctgtattccgtattgcccctttccacttttgagactcccaaaacggaaatgagctagttatagcaatgcaaggctagtgactatcattacgggtccatgctaagacaacttctcatcacttctagtttgggatgttcaattgcgggcctctctgtccagccaagtgaggctatgcgtatagatatcgtctcaaatttggatctgctgagaagtgccggcgatctctctcctgtctatgatttagccctgagcctcgtcaacgactagcgatcataaagcccagcccaatcgaacattacatcgttcctcggcgttctaataacaacatcaatctgtgacttatgcgacgaaagactagcgctgacaccgaaaacaagtcagctcaaccaatttcaaacaaacaaacgaaacgagacgaaactcaccgctaggcgtccctgtcataataacacttcccttctgtaccctgcgcaagatacggatacgcgcagtcaagacaaaatatccgcaacatactcttctcgtctaatctccccatgcacactcgtcttcggcggtagcttactaggggcagatatctcgtcgcagtaacaagacacggtcccagcggcgcaaatatatcaaaccaacaattctataaaactgtaaaatggcatttattgacttcgtaagatcatctgcctgtcaacttaaacaagcagcagcagcagcagcagcaacatcatcataatctataaaacaactaaacaacagccatccacccacaatccccagatcaagccggtacatatggcttatcactcctaacaatataaacctccccagcgagaaccgcacacccaaccaccatcgaaatagcaataataggaagattcacacgggcaaattccaaactcccaacacggatatgcttcctcgccaaaatatcccgccacagcagcccagccagcgacgcactaaacgcagtactgaaagcaccataattgacaccgagagccatgctgtaaacggtagcccaccatgtgcgatcgctgatagggattccgctggcttcgtggatcttctgccatgcctggatgacgcgcgagaggaggatcgtggtgccgatatttgttccggcgaactggatgattagaagatgacgagttagcggaagaaaaagaggctaagtctattttctgttgtcccaatccttacattgcacagaatcacagataggaagcccattccaccgatactgccgattgtcccggtcttttcgacccagtggtcccagccgtacgcgaaaacaggcacccagcccttggtgacgagcgcctgtaccaggatgaacatcgtgaacgcgaagggtactagtgcgaatggcatgtgggagactacgactgtcgtcgtggggaatgtctcctgggaccatttgtagagatcggtagcgagtgataccaggctgcatggggcgctgtcttggtgatatggatatcctgggttctcctcgtatatcgttgattcggtggtttgtggcgagtccagtgtctgggtatatcccggtttcccattgtatatcgtcgagtcggtggtttgtcgcgagtccagtgcctggggagaacttgcacgagctagttgtttgctgtccatcacaacaccgcctggtagctgtagttctgggaacttttccttgtcaacgggcacagagactgacaagggcgttccgcattctggatcgaaatccttcgaggcgatatcactatcggtgctcttgagcgagatgtcgtagtctgtatgctcactgcggtggtgcaggcctgatgcatcatattgatccgcctggtccgatgtcaacgtccctggatccatcttttccggcagcgctatgcgttcgcgcatttctcgctctgtccgtgcttgctcaacctcccgtcgacccttcgcggaaatctcacgggtttcttggcgatggagccagccgaagacgagatcccagcagaacataacgaaagcagcgggtaatgtgacccagaaaacgggatgctctttgcctgatgcattgattgccaggagggtgataagcgtggtggccataatcaaacccccaaaagatgcacccttcctatctaagaatgggttcatgatctcttctagtgagagttgctttccctccttatcatcagcttcctctttctcctcggcggttcctctggcatgagggatgttgggattcacaggtgcttttttcttttggtcctcggacagctcgtgcattgtgatagagagaggaatgagggattcgtctgcgaaaatgatatatagcaggaacgggaacaggataatcgccgtgacgactacgggaacgatcatgttggccgtgtagacgatgaacttgatcttgaaagcgccggcaaggaccaggttggtggggttcgaggagacgagaatcgcagaggcgatgttggctacggcgaactggctgtggatccaggctcgggggtggacgatattgctggatacgcgggtcatgtatgcgaggaacgccgtgccggataggatgatcgggtcgtttccgatgaagctgcctagtccgaaaaagaaaaggaacaggtagaagaagagtcggtggccgaccttgcctgctttttggaggaccttgaaggccaggtatctgatgaggccggaggcgtcaatcgagatggcaatgtaggcgagtgtgaggaagaagaccatgatatcaatgggattgatgttgtctgcgccgactattccatcgtgtacctcttttcggccgattgccagaatcgcgagaaggaataggtccgctgttaaaggtgccgtgatgaagttcaatggaaagcagagtttcacgaaaatgggttgcttttgattgtatcgagggcgagtccggtgtggtattatgcgtatgacacttaataggtccagaatcccgtttgtgagccatcgaggcacgtatatagggatgtgaaatgggaaaaggacaattatatctgcatcgcaagaaacaaaagtaagtcttcgtctcacatcaggcctaaccagacttactagttataacaaaaataattagggtgatgattgatcgccaacttttgatttccgaagtatccagttcgtcgtccattttgaatgtttgcttctttttctgagattcacttcaagaatataatagctgtggtcgtgtcagcccctctatcgtacttccgccgtagtcaagtcatggtgacaaaataccagaatgcggaacaggagaaagttgcgtagcgagatccaatccttgcttttattgcagacgcatttctcttttgcaaaaagaaaatccgaaataacgcgacaaatatgacgatcttacttggttcctgttggagaaattttgtctgcgagttgctctccatccatatgcttgaatgcaagggaaaccaagaaattttcaaaatgcagagaaaccaagtgcactgcccctcataatcacatggacaagctcagatgattgtgacttgggccgcggagaggtgagcgccctgctaatgaagggctgaataataatatctctgtgctacgagtgggtttatggatggataaattaaggttatactagaagctgggcgagtttttttaatattgatatcataatgtgatagtgggatggacaggaaagaaacttccgccgggtctgaggacctgatgtctaagcctcaacgaaaagatcaatcaggaaatagtacgacatgcacgggacatagagaacattctgattagcttagattagctctgggcaaaagtgccaataacaagattcgaggctattggagactggcgaaactgggaaaccccgcactctgccactttgggaagttgtccgtgcgttgatgttagctttaacgttggccgacccatggttcggtcaatatcagacccagtcttttttgggggttctcgtgagttgaatcattcaatatttcctacttttcctacgttatcgctccagttgctcgtgaggacctcggtaaatgcataaatgcttacaacacaacacatacaccgcatgatatgtacgacaggccctaacgtgccaatcagcgggagctgatctcgccacatctcgtattccgcccgggtttttgcgcccgcccaagtcaatatcatggggcacttatcgtttcgagggttaggcattgatcataaaggttcttcctgggtctatccaatcccagctagatcgaggctccaaaccccgaaatgaggctgttgctgacgaaatagctgcatgctctgttggtcatggtcaatccacggagtagcgcttcgaggataagacggcctggagactccttgctttactttcctcttctttcttatgatatcccggcgagcttcattaagtcactgccagaaatagagaacaacacattaatatatgatttttttgctgctttatcccgaagttaccgttaccggaggcggataacatccaatgccagcaatcccaattgttacctccttcctagagcaagttctcgtgcatcgtgctactgcaccgccccctaacgtgacagtgtctgcaacttccgcatcactccaggtggtttgcgcctggccaatatcaggccaatatggaccggggacccgagtcctgtgggttttccgataatggtgttaccatgatatactaacatttactccagatactatgtcttgattgcagcctgcgtggtcgctcgcaaagtagaatggattcggaacgcttgtctagccgctgtgttgcttttccccgctatcgccgctcttcacgggattgtgcttgctgcgcttcatgttgacggtgagtctaatgaaactttgccccgggtttcctcctggtgtgacccaatctgatactatataggcgctgtcgatatggatgtatatggagcattccagctatgcgcaattggaatcttaaccgccccagcgaccgtcaggctttcccggacctacttcaacaaccccggccgcaatatcatctttctatggacagtccttctcctggctgggctagtaagcttgattgtggaattcatgcgcctcaagcccactacttgcccggatgacgacccagcaagcattttctgggcctcaactgggggcaaaaagggcggtgtgtttaagtatgactctaactgtagccttgcttgtaccccggagaatgggccagtctcaccgttgcgacttgatgcagccaacaatatatacgtgattccagtcccccacgagctgacgttcaatgctactacgctaattgcggctgcatgctgcatccctgccatcctgtcgttaatatttatgtggatcaaaatcttggacgacaattgggagaagttctcaaatggaagacagaagcagaagccagatgatttcattctgggaaccaacggagctaccatcaaccacatgactgggatcaccgacaggataagcaaatggctatctctcatcgagataccggtgtttgctgcagcagtgctggcaatcctcgtcaaaggcgagatgaatttttggagtaagcaaatgaggtaccaaacagagcctatacaaagcattggtaagtggatgttgcacctcgcctggttttggcggttggaaataaacttactaaaagaaatcgttaggtcaatgggcgccaatcgttggtacagtactcgctgtattgggatcactatatatgctcctttctgcggatatggaagccgcgggacaagaagatgaccaacaagaagagattatcgttggaaaatccccaaactacgacagcactgtttcatacgccggaagcagttccgcgcaagattctagaacaagtgccgagagacaggactcggatatcgaaatgacaactatacgccgccctactaccaatcaaaccaccaccactcaatcccagcacgacttaggaagacgaaaggtcgcccgcttctttaatgcagcaagcgccatcatgaccgccaaagcccacaatcaaatcaagaagacgggtttcaatcccgaagcaaaaacaaattaccccgagatcccaggagaaatatacagaaactcatatctccctgatcataaagcccattaccaaaggtcatctacacccgataaccgatcaagagctgaaagtttcacaagtcgcaggaactctgtggataatggcgaaggcagctctgggccccggagtacaacacgtcattctgtgcctgctccagctgtctcgcggccaagatcacgccaagctcactcaaattcgctcccgggtggggggttatttgagacatcgaccctgcagtgtcctccagccacacttggagggtggcagcgacaattgagtcccttcgatacaatgtcgatctcacgaagtagaacaccgtctatttccgaggtcagccccacaaattcatcgccgggacctcagttcctgccggagatagtagtttctgcccatgaaggtagttgattgttttgcatatggtgtactgatgctccggtactctaatggtgcgtggttatcttttctgttttattttcggaattctttatgatcccacgagttcattatgtctaggcttatacggtgtatattacagggtttcttcatacagcacattcatgataaagtgtcatcctctcatacctcaggcataatcacgtgataagcaatgtggtggagtggacccaccttcccctttaggaagtgtttgttcctatatatttcatagcaactccttcctcctaaccgacattccccccagtggctgagtgtgttgacacgcgtttaaaatgctaggttaggtactagctgtcagcgttcgacccacccagtgcacggtcataaatgttccaattacgctcccctaattggcccaccttgcttagtcgccggtcaggacctccagtaggtccggcaatgtgtgcgcaggtggggacgactagatcttagggtaaagatggttggggttacttaagcattatgatcccctaagtggcgacctgggagtataaccccaggcactggatgggaatgtcctttttttgccattttttcccctccttctacttttctctaaagtctgtctccaacaatttatgcctgcctttcctctcccccacaaagctcattgacgcttactacaggtatctatcatgagaacagagacaaggggaatacgcttggagggcaacattgtcaaaattagcgtcggtagttattactgtccagaattatatgtatcaactaccaaattatcagctataacccttcaaccctcaggctcctttctcccctcaagtctagcctgatgcgccatttttgagatcagagtcgccattccagcatgatggcagctggtgcgaggctccttttccggcaagatctcaccctcctgcccatcaagcttagagaagtccaaagactttggtttatcacagttatactgtgcattggcggcacgaagaaggcagatctcatttttcatgcagtcaccattgcagctctcaacttcgaatccgcgaacacgtctcgcccaataatcttggaaaaccgtgggatcgcgttccatcgcgacggtgacattgtgccagaaagctggactgatctcggcttgtggatccgtaagcggaggagagatcttggatccatagtctgccttcgcggagtaatagggcagccattctggctttgtctgaaaggacgggtcgctgatgttggcgatgtattgagtgtaatccaagacgccgaaagtgactggatcaatttcgtagacgcggaaagagggcgagccttccgttggcgttacggctggaataatataacccattgcagtagctgtgttccagtctcggtcgttgtagtcggagtatgcgatctggaacccatcccggtgtgtatgaccatagaataatcccgcgatggtggcttcgtaacgctgcacaatttggtcgaagtaatccgaatggtcgcggaagtgatctggtataccggatggtatatgagagattagccatgcacgttggcccgcgtcctcggcagcctgcagttccttgatgagccattcaaattgtcctcgtgggtctttctccattggttcctggtacatatagaagttgaatacgtagtagaagatgctgttataagaaatgatgcgcagattgctgttgggatggacggctgagtacgacgcgaattgatccgcagatttgacagaagaaacacctgtgaggccataccaatcttctgcaagagccgagtacgcccatttgggatcagctttattcgaagcatccgtgggaaagaggttgagtggtgcagtgtcatgattccctattgcagcatacacagtgccaatgtccttttccattgcactgtacgtagcattgagcgctttcagagcttcggcctcgtcaaccaaccagatatcgtgggccaccacatcaccggtgtaaatggagaactccggattgatgtctgcgatagcagcatgcaagctctcctgaagtatttgtggtgcgtcacacttcgtatttccaaatggtccacatgggtaggctgtattctctggtgaatattcatccgaccaagatctgcaacagataggcttggaacacttgtagctagattcaggctcgtagaggaggtccacgtgtgtatcgctgaaatggacgaccttgagcggtgtcttgccgctaggtggtggcctcacagtctttggcttgggtgaagggaacgtcaaattataggaatgaacatcgggttgcttgcagagcccgaccagattagcgcatagtgtctttgaggcgtcagagttcagttgtaaatgtttgaaaacatcatgcagcgcagggccttctttcttgatgatcccggcgcagacatctgggtcctcgacctgtgcacttgcgattaatgggattgagtcagtaagctcacgagcatggccaacataccctgctgattttgcacaaccctgtgaatacgtcgatcatgaaattctcaccaagccctgcggcaactttgatgctgccgaggagaatctgtataattgcatagagtcagcaaaggagtcaatagaatggaagtgctaaacataagcatacttggcaagcaccgcagtcaactgtattcttgaagtcgtcccagatagaagcgacggactggtcgacttgagtctcggcttgtacgccccggagagacgccgaaaggccgaacgccagcagcaagaagttgagtctcatcttgacgaggagttggctagacgaaacggctgattggatgaagacaaacctcgaaagcagtcagggcacttcgtaccttcccagcattgatgtgaaactcctaggcagtcggcatcttaaatatcacgggccaagagcagctgggcaggcccttccgtactttgccaaatagaaggtgatcctacagctgcttgcttagattttattcggttcagacataaccttaggacaactttttatcatgtgatgagcagtagagtagtattcatatcccctccaggtcataaaaatagaccacggtctttttgtggcctagtggtaatacgctgtattatttcgagaaacgcagccaaggagctagcagatagtcccttgtaacgttgcgaagccgctgatctcaggggctgattatcatacgccattggggtatccttggcatgttcgcatactcgtgaacttgctcctaaataggagtcgcggtgttcaaacgaaaatttagtaccaaaatatagatgaacaaccagaagcttatctaaatgtagatatgcacaccaagttcatacggtaaaatccgatcgaatgcaccagtccaaccattgtacacgtcaggctcagcacttgcaggattcttagtaaataaattcttgaaatcttatgggtaggaggattggttcgaacggatacttgcaggtgttgatctggggtagaaaatcaatatccgggctcgggtctgctgcttgggcgtattaggaaggagcttcaacttttggcctgatgcatcacactaataattggcgaatagacagatcgctgtcgatcgcaaatccccaacccgtctgtctcacaacagaacttcctctgctgaatcccccagcgcgcagcctcgcagactcggccagattcaataaaatgactgccacgtgtatttcaagaactttgtgactccggaatgtggaatggctcatgtgcaggaaccataaattgcttatataggcgcggaccagcacagcccctgacagaatactcgcgcaggtatccatgcgaaaaaaatcatagtatcgtgtcagtctcacgggactctcgaatgggttgagtaagatattgttggttggttggatttcgtcatggattggggtcagctcgctttggtctgttgtgccatgttcattggatgagccagccatatgtggggattttcattaagaaacaatccctggacaagaatagtatttgcatgctgtgtatctgtgtatttgtgtagcattatagcctcatagatgtaccttgaaaataaaaagggacaaggagagaagtccaaggtgattggcgggccaaagccggggtaaaaggatctaattttctctctccccacattctttttgacgtgttgaccatcttttccttcaacccccttttcctttctatctcaacatctgtccaagtattttaatctctgttgttctccttcttctccccccgtcctccatattccggattcggactccgtcgggaaacgagacgatgacgcctccgtacacgcgccatttcagcacgcttacgatcacgatcttacaataaaatccgagagcttcaaccgtctgcactgttctgcgctacgtgtgattgttaaaaccggactgtccgttggggcagtccgccatcggccaaattcgtcatggagggtcgtcaacaagccacgctgggtgtttcgatcacccttttctccatcgccagtctatttgtcgcccttcgcttcatttcgcgtatatttgtggtcagaaagattgggttacacgactggttgatgttggtcgcatgggtaggatccctaggcttgatccctgcatgtacccggggatgtagcgagaatgcgctctattgggcacatgatcgaacctcgtgctggagctcggaggctaaccagtctgcagttcatcgattttggcttttccttctcgctattctacgccgttcggaagggtcttggcctccattcgagtgacattaagcctgaagatgaactcgcttttaatacggctaattatgcatttacggtcctctatgtgagttacaatgccattgttacttcccctgttaccccgcaggccaatactgaaataaatggcatgctgacgatatttcagaatcctgcgctaatggcggtcaagacgtcgatcctcgtcttcttcctgaccttgacacgcaatcaaaaagtattccgatgtgcaaactatgtcactctatttgtagtgaacgcagcgggctttgctttaacattggtcaatgtttttcaatgtcgtcctctcagcgcagtattcctttctgacatcccggcccatgcgagttgcaccgatattgtcaccctgtacctttcctcgtccccggtgaatattattacggatctcgcgatcctgttgcttccgatgccgcttttgacaacaatgcgcctaccttacaagcaaaagattattttggtggtcactttctcctttggtttctttgtggccgtggtcgatgtggttcgaattgcctttctccaacaggctgccatttctcgttcgctggaagtcaagtcaattcatatccaaaacatcgggggggttgatttcagttgtacgactcgctcatctccgtattccaaattaacgcgtcaattgggctaacgatgggatttcacagggtacgcgtcgctatctttcatgtggtctgtcgtcgaagtcaacatctcgataatctgcggttgtgtcccgagtctcaaacctctggtcactcgtcttgttccgaaattgattagagacactggtgacgagacatcaactgcttcgcctcatggactctctgcaggcccaacaggagaaagtcaggttgcagtgccacccccggctgcagtctcgggttcgccagaatttcaattgccattgccatttccatcgaataacaacggggataagggtctacggaaccaagttggtggtgtctccactgggcgacctagctcccgggactcggagcctatgggtataatggatttcctaggtatcccagaaacaggggccctcgatacagagggaggcaccaacacgagcgcatcttatgcaccggatatcacattcttcgattttgtcaacatgaagaatccggaaagtatgctaaagctgaacaacagagagtcgattacgccaattgcattgaccacactactattcttcctttggggtttcgcatacggcttgcttgatattctgaattctcaattcgagactatcgtcaatttaggtccttggcattccttgggtcttcatggcgcgtacttcggcggatacgtggttggccctctattggttggccgaccggtcttgaaaatatggggcttcaagtccacgttcatcactggactttgcatctatgcctgtggaaccctcatattttggccttccgctgttctgacgtcgacacctgcgttcattttgtcaaacttcattgtcgggtttgggctagcagttttggagactgcggcaaacccgttcattgcgctatgcggaccactcgagaattccgagatcagactcaacatttcgcagggtgtgcaagctattggaagcgtattatcgccgctcctagcgaaacgtgttctcttcaagaatgttcaggatgtcgcatccttggttgacgtacaatgggcatatcttggcattgctctgttcgatgtgctgttggcagtggcgttctattatctaccaatccccgaagcgtcagatgaagatttggaagaactagcaaatcgacgccgagaagacaatatgaccaaagtcatcggtattccggtcgtttggctgaccctcggcctgggagtctggtctcaattcttctacgtggctggacaagaagtcgttgcgacagctctccaacgttttgttcttgccgctcgtccagattcatcactcaaaccattcgatttcctgactattggacacagcattttcgccgtgggccgcttcttcgccgcgtttgcgcaatggttcctcaaaccacgatggattcttatggtcagctacatcggcatgatcgtctgctcaattctttgcatgaaaacaagcggcacgggggcaatcgtcatggtaatgctagtctacctattcgagagcggtgcattcagcattatctttgccatttccctccgcggcacagcccagcatacgaaaacagccgcagtcttcatgacagcggcaattggcggcggcacctttttcccgtttgccgagtacgcggcatacctcgcacacggcgggtcatactccttctgcgttatagtcgcgctcttctgcgccggtgccatcttccccatctacctcaacctcgtacccgccgtgaaaaagcaagtcgacccggttccgaacgagtatctccgccgacatcgccgccgacctcggacctcgatcgagaccgtgcatcgcgaaaagagcaatccttctcttggtggtgttctttcccatccgcgcagtctggcatcgaatccagaccacctaccggatcttctgcttccggaggagatgcacgaaaactcgcttgctcgcgatttttcaggggctaaatctagttttagctctacctcgcgtgccaagtcgaattcctctcgcaattctggttcaaagaaaaagttctctaccagaattgatgatttatgactgtcgctcaatatgcctaactgctgtttttgtctctttccttataccctaaacttcacgatacttgcgaacccctagataccctttcgcttttgctttttgggttttgtcacaatattatgtcatgtgtcttctctgtgcatatattgggcggcaatcctttttgctttttcgcagcatttcagcgatggtgttttgaccaaaagttattccttctctcttagcttatctggtttcattgcttaatgatattcgaagaatctcatgatcaaacttgacttctggctgggatcaattgcatatacctaatttggatctgattggttctcgaccatgagggttctcgtatggcccaccctatcaagatgtcgtgacccttgccaatcacccgcgggcaattgcagctcaggcagcactacctaccaagtctcgttccagccccttttgcaacctcattttagctttcgcctcaagtcggttcggggttgacccatctacggattttagatgtagtccacaaccttcgaattaaagaaatatttacaagtcgatacattctatatatttacacgtagcatcttaagctgcacgtagccgggcgtgttaaccaaaaaagggctgttttgggaacttgctcattaagcactagcatgaaaataggtagttctagatttattggctatgtactatatgaatctcctcgtacccataatgacatatatcattcttcaaccgagcgcagattccgtttagatgcaaagcagctgatacattgtttgctattcctatgcagcttggcagacggcaatctctttatccgccctgcagaaacgcggctcggcaaatctctctttgctcatcttgcggaagatgcttctctagaggatgtctatgtgtctttgtccacgaagctacatagagagctttatggcaatagctagatcatcattttccatccacttcatatcgtcatcattctggttgactattttgcttctcgtggtctttacctccatcgtcatcatatctgtgtgatgatctagctactgtcacaaagctctctatatagctctatgctataaaccaccaaattccatcctccagaaaccagaagaagcacctctatggcatttctttcacttgcggttgatcacttcttctctcgtagtctgcgccttgatcagattcccaatcctttctatgtaattttgcgtgggtcaagggtttatcttggagagtgcctttttagacggtttcatggtcaaaatatgtacctcactagtaattttaggtagtctgacaatgatgatttactgaaggtagcccatgaatgctactcacactgtcttctttggatcgccacagatctccaaatcgcgaactaggtcgagggtggaaataccagaggaatgtcaatcccggcattccccatactatttccctccttccctaacaattatttaattccccaacaaagaacaaggccaggctagaatacaggatagtacactcaaactgaaaccatgaccaaaaatcagagcctccgatgcaacaccgaaaaaggtgtgatctcggagatttaccttttgatagaagccagtcagattggattccggcggtggcaaggctagtggagcaagcgtcgaactaaaaagcctataagaaggttaaaagcctaggcacgccccagtctcagctacgccacgagatagttcacaaagcctcatctattagagctaataaagcgatgtgcctggagtaactacaatataagtaaatttctcgataaagtttcggagtagattaagttatgcttgcgatgctctatagatatcacgatcggttcttatatagtcagtccctaccgccgttaagattaggcctacgattaggcgtaagagctaatctggtccaaaactcaaagatgctctgaaagatacatgtaacaatcaagacacggacttattgcccgattcttccatgatattcagatcgagcgaaaaaaaagtcgcccccctcaaacgcgcacagccatccaacgggcagccaccagcggttgccgttcggattggatctggagagtccacagcggaacaagcgcaaaccagtggggttgcgagattcagcgatttttgaaacggcgattctgttcgtttggtacgattcccgacggggtttcttttttttttttggctgcactgggattggttgatttatacagaccgaaatgtagcctattctctattatactaaaccggacaggtgggatcggctttaagtttgaattccttttttttttctccacgtcgaaggcgcaatcgccccaatgtctggctctctgtatctcaactccgggatcattccggagcctcgggtgacttccgttgttctacagaccttgttggagagtgttgattctagttttcatatggattatatgtatagatgaattacgtatatatccatctacctatgcgatctagtaaaaccgaataggacaaagaaagctcccccccaatgatgaaactcgtaacacaagtcgcccgttactaaatgcgtattttgcgcagaagccagcacccatatcctaatgtacaggaacccgtattaataagaagaacccgctggacagaacaaatgaaataaacaagaaacaagatcgctagagatgaaaaaccaggagccagacagggctctggtggacgccaagtcgctgacccaatgtaaaaagacaagagtcgaaacaagaacagtcaacagtgctcgatgaacctcagctgcgcgcactccgcggcagtgagttctgcgaggacgagtcgtgcatgatatccggcgcccggggaccaaccatccagtcttccatagcgagccattcactccagctgcgctcggcggcctcgatctcggcgtccagggccccctgcaacggacgcaggaacggtatggtctccagcggggggatgtcgtagtcctttttcacggaggcccagccgccgctcttggctgcgaagaggtagttgcggcgctcttgctcgtgcatgggtcccacgccgctgccccagtcgtcgccgaagaagccgtgcagcacgccggggaagtccatgccggttgcgactaggcggcggatgtaagggatcaatgagatggggggtggccctgagggttgtgtgccgggtggggagggttggttggaaggggtcgaggttgagttgaagattgggtgaggttggcgctggaaggggagtcggatgtttaagaatgtggagagggcctggacgggggcgctgtgctgggcgtgatctaggaagtagcgttgacagctttgatagcggggataccattcaaagatatcggagttgtcgtctgaccctggcgaggcgtcggctaaaccaatcacaggggccgggtcaatttgtggatgggagctcatagatgggtgtggtgaaggtgagtccgaataggatgttgaggtcgaggtcgaggttgcagttggagctggagttgcagtttgtagtcctggaggatctacttgtctattccttttcccgatgctttgcttagttcgtgttctctctcttcttggtctgtttggggctgcgcctctttcccgaggtctgggaatccagtggggtcgaattgcggccccaagttgaaggaaccggaggggtaggtgggtgaaagatagattggggaatgattacttggaaaaaatatccctacctcgacgaactaggagagagactcgacgtcgtgaaggggaggttggggagggcggtgcagagcggaacagatccctgatggtcccgagtccgccacgagattggggcttgttgatggacatctgttagggaaccatctaggatgttcaggtgaggattgggggatgttcacggaatacccattggggatattatgtatgaagcaaaagaaccggagacatacatgtgaattccaatacctcaagaggcagagggagggaagtagaagaggaaccagacgggagaactgaagtaaattcagagagaaaaaaagatatcagaattgttctggaacgtccatagaagagaaacggggtctgtaggactaataagagacgcactcaacctctatacggagtatttctgaatcggatccatcgaggacgggtctatccggtcaggccaatcattctgagatctgcttaaccacgggtcgacggtggatatcgatctagggcaggttttgggaatttttatttgatatattaatatattacgcttatattacacctttaccacatacattcccgatacggaaggctctcaatcctggataactccctattttgtcacagatatcaattactttgcacgtctggcacgtcctattggcccggatccgggcatgctaataatacctgttcctataaaaggcgtccgggtacatgacatagctgcatcgaagcgtaactagatcaggctggatcagaaagggaaaaaaagggggccccttcaagaccgggacctcctggtatgtgctcaaccaatctcaacccgggctggtactcgctgcaaggcgcctagtcatgattgaaataatattagaccagagaacgcctgcctattccatgtcagcattgcctcagtattaagtggacgactagtcagagcatagcgttaaatagattgaaccctgcagggtagttcgtttcggtatcacttgacgcaataattgaatcaagaatcacactaagagtgacgttttgatagtgggtttcatatctaaatcaaacacagggagttgatctgtataccatgtacccctcctccctgccaagttcccacaaaccgggttcttcaacatcgcatgcagcacgcaagacccggaatccactttgttgttatcgaccccgatcttcgatccgggaacattccttattctgattgtatgcattgcaaggctacggagtacttcttccacctcaatccccatttgttcaggggccgcaatatgacacaagcttgcaaagtcagccccatattggcgtcactagagcacacgcgctaggatctacttaaaaaagggccagaacataggagagcaggggccactcatcgagctgtgagagtcagatccccctttagcggggaggtcaagctctgacccgatcgcgcctcccagataagaaatgacagagctgatctttaggggggttgaccatcccgtacggaatacggagcactccgtatggagtacggcgacctgctttatattgtctactgattaagaattcaaatcgcagtttgtgtgcgggcgagtttttgtaactccttttctggagtcgatatgggtcccttcagctgcacaaaatctggtggcgccgggccaggggttaagtaaagggcggaactatgtgcgtcgcattccccttttgcgctttctttttcgagattatactgtcggctatttcgattgggtcgagtttaatgtattcatcactgaccaattctaatattgtgaattctagccatccgatcaatctattctcactcacttccccgtggaattcgccacatgcggagctccaatctgatccactcgtttgccatttgacaggtgacggggcgattctttacaatatatgacatgtgtctctattgagctaggactgcagttcgagtcagccagtcggaatcacgaactggcaagaagtgtgatcacaaatcacagcctgagatgctcttgccaattcgatcatagtgcgcacgctgcacggtctcgccgatgtttatgcgaatatgcgaagaccacaatattctccaagacggtagtttggtatacccgctagtgatgacaacctattgccattcttgcggagcggagccaacccagaacagtgacacaactcggccgacgccattgagctgctagaggctatagcctgtctcaactcaagcgcgacgacaactagtacgcacgcagtatccacgctcagttccgcggatacccctgtaaaggttgcggagcgggtagatagattaaggggaatctcaagctgctgcccaatcaccacactaccataccctatgccaatggtataaagcatttgaaacaagccggtctgcatggatatgtgtcgttccaagacagagacagcatggtcgcatgaccaagccctctgcactgcagctagtgggtattcggataaagctccgcagcgagttggcgaccgggcttcgttgccaagagtgtacgagtactccatacagacagggttcccgccgaccgccctatgtactcgttatgtcagaagcgtcgaattatgccggtggtaagtaggtgtcacaacatcgcaacttgccacgcgcgatcagtgcatccttcgcacatgtgtcgtggcgaagaacatgtaccacaccaatcccaagatgggagaaaacggtgaacgttggacttgcaccccttcgcgacaagatcgccggcgtttatatatccatgcagggtcgaaaacggtatatcaacccacacccggcagccgacacgtgtcaccgcacatctctagcagatcaacatccccgacacgaataggaaaaacaatacttaaccagcaaacagcgcgaagatcatcgcattatctgatccatctcctctagttacctggccatccatgtccacttcgtacatgacatgacatgccgtgtaactcgtatccctctacgactttgcaatgctgcaagtgagcgatgaggatttctatagaccgtaactcaagttcttctaagttcgtgctagacatggataaccccaagccctccacaaacagggcttcgtaaatcctcgcttcaaaactccgtactccgtactccgctactttctttgtatgtaccccgcgaatagcgcgacagtggcgatctctaacccactcggccggcagaaacgaacgcagggccccagctgacgatctcgggtaaaccgtgtgtcatgggcgcacggtgtctccgatagggaaatattggacgaatgggaaatttgctactgtcatggactcgtgctggtgtgcgggatcgcttgttgcggagaacgccgttttcctggtctgggctagtctgggctgatctggggaaatgaaatgcatagttgatactcgtatactatccatagataacgtagatgtgcatatttttgaatggagtaggtgtgttgatgatgactgggatgggtctgatgggcttggatatcgtggtgtcgatgagttaagttagtgtcatgttagcgtggaagtgaggctcgtgttatttccacgtggcttggttgaaacgctgatgggtctgtactccgtatatagatcggtgttgaagcgctaggttggactatctttatacacactgtcccataaatatgtggttgttaactaaacccatgggtgaatttccggagatatatcctatggttattgtctgtttgaacggtaaatatatggtggaccatgctttggggtgtgcattgaccagatgaattcagccctggagattaatcatgttcatagcggagaatactttacgttgtacggagtatgtacatcattgaatagatattcaatatcagtcaagacaactttggaagcacagattcccattcgtcagatatcacgtcatggcaagtccggagcacaaggacgtccaattatagaatatttatgtcaaaaatccaagaatctctacaatagcaagcggcataagtgaaacatggagacgctagacaagctaagagatctacccgacgaactaaatgacccaacggtctccacgttgcaaccctctgcaagcacgttgtcgaacccacaagatccaacatccgaatctgcaagataagaacgcatatgcagacgctaagtaacgggaacagtccacagtcaaccctaagactagagagctctaacggagataagcttctggatctgcaacggaaatccactgggtcctgagggtcccaaggttgtcccacgggccacatgtggtcatgtgcgagtatgaattggaggtcgaccgaggcgaactctcgtgcgagtacggagtagttatagatcagatcaaaccacagggacctcgggagtaaaaaagacggagcatcccgtgtgagtgattctacatttggcttctcggtgaggattcctgtcgcaaccccaggaagcaacacgcagcctccgcaaatcgctatcaacaaggagtggagaggcgcgtctgagttttggcggagagctgtagcgggcacccgttcgattggtggaccgtggcatgatctaggatctagcaatgtgtaaaggatcaggatgttggcatttgtttcttcctttctatttattttatatttatttgcatcgtatgatcgttatcctcgtactctgtagaggcagtcgaatcctgcaatatatttccttaagattaggataatctagagctgatattaaaggtactccgaagtacgtccacggcagcgccgaccatcggggctccaatgcggttaaccgggtcttggcatcacacgggattggtgcctgacccacgggggaaaggacaaaccctggacagtccgagatgactattcgggggcgattgactggaccgggatttggtgcgggtattcgatattccatggatttggctactctgtgtatgtatgaatatgagcattctatatgttgtagcaacttttttgatctcattccgactagatttaggtctggaattacccctccacccctccatccctctacccctctacccctcagttcaactgatccagtggggcaaaggacgagccgtagggtgtagataaaggaaaaatgagtaaaaagtgttagaaagcaaagacgatcagataagctcggtaagctaaaagtggcaggccccgttttggggggccgctttgggtatagtggacacgtgacccagcctgcagccgagtgaaattgccgagttgagtggcggagacgagttttatttttttatttcttttattttacttttatttacttcattttcgattcaatccatagccatagggatattcatatgaggatagctcgaagatagctcgaagatactatgttggacttcctagtaactacgaaatgcacagtccacgcatgcattagaggttcagcctcctcacaaggttacattcacttcaattatattttttcacctctcggatcggtcctctccgagaatacggatcgcggaagagatattcacagacaaggaagatttaggaagaaaccacgggctatgattgatgggaagattcgaggtagtccaatgtgggcaagataagccaaattctgtgcaaattctgtgaccttaaaccataagataacattgttcgggccccgaacttcggacgtgcttcccacggaaaccactggaaaccattgggtttcatctttcgcttgggatcttctccttccaattcgtgcaacctggtcttctggcatggtcgtcgactgtaggctcatcgaccaactcccgtcccttttccccccatcgtccggaatctgtcgtccgactccggcttggagtctggctctccacatttctatatatttgtacaatcatccccttccctccttcttcctccatctactctccaaaatctcgattgtcttatactctgctcgtgggcaatttctaatatcataatcacatcagatcactgcctagcattgatctaccctacctaaaagcagagtaaccgagactaaaaacccgccgaaatgatccagaacctccccttcgagcctgagttcgagcaggcctacaagggtatgtctcttccctttcccttgtccacgccaatgccatatcacaatttttgcccggcttaattcctttaccgtcggcatcttcccggcgtgcggctccacaatttcggggtgactcagctaacattcccgaaacagagctcgcctccaccctcgagaactccactcttttcgagaagaagcccgagtaccgcaaggctctccaggtcgtctccgtccccgagcgcattatccagttccgcgttgtctgggaggatgatcaaggccaggtaagattcttgtcaaaagatattcgatcaattgccacattctaaccccccctccttcaggtccaaatcaaccgcggataccgtgtccagttcaactccgctctcggtccctacaagggtggcctccgcttccaccccaccgtgaacctttccatcctcaagttcctcggtttcgagcagatcttcaagaatgccctgaccggcctgaacatgggtggtggcaagggtggatccgacttcgaccccaagggcaagagcgacagcgagatccgccgcttctgtgtctccttcatgaccgagctgtgcaagcacatcggtgccgacaccgacgttcccgccggtgatatcggtgtcaccggccgcgaggttggcttcatgttcggccagtacaagaagatccgcaaccagtgggagggtgttctcaccggcaagggcggcagctggggtggttccctcatccgtcccgaggctaccggctacggtctcgtctactacgtcgaccacatgatcaagtacgcctccggtggtaaggagtccttcgccggcaagcgcgttgccgtctccggctccggaaacgtcgcccagtacgccgccctcaaggtcatcgagctcggcggttccgtcgtctccctctccgactcccagggtgccctcatcctcaacggtgaggagggctccttcaccgtcgaggagatcaacgccattgccgccatcaaggtcgagcgcaagcagatctccgagctcgccaccgtggccaccttcagctccaagttcaagtacattcccggtgcccgtccctggaccaacatcaccggccgcattgatgtcgctctcccctccgccacccagaacgaggtctccggcgacgaggccaaggctctcatcgccgctggctgcaagttcatcgccgagggctccaacatgggctccacccaggatgccatcgatgtcttcgaggcccaccgcactgccaaccccggcgctgctgccatctggtacgctcccggtaaggccgccaacgccggtggtgtcgccgtgtctggtctcgagatggcccagaactccgcccgcgtcaactggtcccgcgaggaggtcgactcccgtcttcagaagatcatggaggattgcttcaacaacggccttgctactgctaaggagtatgtcacccccaccgagggcgtgcttccttccctcgtggctggctccaacattgctggtttcaccaaggttgctgaggccatgaaggagcacggtgactggtggtagatcagtcgccctcccgtttattctgggcggtgttctgtgatgatttctgtcctctcttgaggagaggcagcttcgatgcattttattcttttctttcaaaatagctttttaccctttatgtcaagcgggttatggatagaggcgcttggtttttcccctgttgcatttgattgatatccccacttgagcaccgctgtttgttttggttctgcacttgggattgtcatgatgataacgagattcaatgaatgattcaaaaatacctgtgccctgtaaactgtagatcaaagtagagccctacggttgcatgaaactttcaatccttcaatcccatgaaaccctagagaaatctatagatccaaatcaggtgttaatctgtcatgtccaacgcttaggccccgaccagtgctgcagcacttgccannnnnnnnnnnnnnnnnnnnnnnnnnnnnnnnnnnnnnnnnnnnnnnnnnnnnnnnnnnnnnnnnnnnnnnnnnnnnnnnnnnnnnnnnnnnnnnnnnnnnnnnnnnnnnnnnnnnnnnnnnnnnnnnnnnnnnnnnnnnnnnnnnnnnnnnnnnnnnnnnnnnnnnnnnnnnnnnnnnnnnnnnnnnnnnnnnnnnnnnnnnnnnnnnnnnnnnnnnnnnnnnnnnnnnnnnnggccctaccaatgctgtctcagaacatgtggctatcaaaatgtggcttgcacccacaagatacaagtcacgtgatgatggatatgctttgtcacgcggtgattacgtaataccttcacgagcctcggagccccgaccaaagaaagagctatccctcccagcctcaaaacccgtgacctattcctctaaagaaaaatgactagcgcgagtctgtaacttgcaattcctatttctacaacatccgcggcgcagtgttatgttgtggagatgacaatgctgtcggacagggcaatccccgaacaatggaggaccttcctccaccaatgtttggcgaaccgtatagatatagacgagttcacggacttgtccgggctgatgtttgcccgcgcaccggttaaggaaaacgagctccttgatctgctccttgaagctcgcgcttcttccagtgttacctgggaccctcttttgccattgtacgtcgatggactgtgcaagattgggagggttaggtcttcgtctgcgctgacgagtttgctgaagcattcttctgttatggatgcgttggggactggtgatggcgatggtgaggagggacagggacacggctctccgtccaaggctaagaagcacaaaccgtccacgctcatgactgatatcaaagtcattcaggatgtcatggtgttcatatccaccgggtcaatcccgaaaactgtcatcgaagctgcggatatatactcggctaccgtagactggattctggccgtcgtggcgtggcacaatcacagctctgactctgagcacgcgacgggtggcttgatggggtcgcctgatgcggtctcgttgtttgagtcgctggggattctgcttgccgctctgtcggggactggtaaagggctggaggtgttgtccagtgattacaatcaaggtatgtatatgtggtttccgtgtttgttacacgttattaacgatatcctctagaattgaaggcgaagctaggacaggctttgtcaagctacttgcctctctgtatcgatgtctctctgccgctgaggcatcgtttggaggggttgcagaaagtgtttcatctttaccccggtcaaccttctaaggctttgggtgggcctgctattgacggtgttaatgtcaatgccctccagtttgagtcttccgtcatggatggccccgttattaacactagagctgggctctatgtgtacatcaactcgatggtacgattatcttacgctacgatgttggttcatggctgactagtaacaggtcgtgggacgtcctttggtcgatgacactattctgatcaactacctcaccaatcgataccaggtaagtccaattgacacgatttctagtcagagttgtttacaacatttgattaacccttaccagggccacaatgacgttctcatcgaggaaatcatcacagccgcctttgatgttctctccaacggcgtgtatcgtaacgaatctggccgcacgatgctcttattccggtctttccttgtcaacaagctccccgccttttttgcagccatctcggcagcatccatggtgccgatctccatggaaatgtgtatcagccacgccttaagccgtctggatccgaacgcattcccctccttctctcagatgttctccatgcagggcagcagtgttttatcagatgctcgccaggagttcctcttcgcttgtgcgtcgcacaagctcatacgagaatccagcattgaacagcttctcggagaaaatcccatgcagacactgcctggtggcggcccttatgtcaaggatgatctcgtttcgcaaatcaataacaatcatgaacgtgctgagcaacttattggtgagatcgagtcgatggagggtaatgcaggcgcgatagttggcgctgtggtcgatgtatgttcgatccgatatcaattcctgggagtatcaacatgctaacttcttcaaggtcatgcaaaatttgtgtcatcaaaaagagacaatgacgctcaagaatatctgcaattcgctctcacgccgcccgcagactttggacgtcatgttgcttttccgcactacaaagcaagtattgcaacctctttgcgctgtccttgattcctggaagtgggacgaggaccaaggcgaaaatcagcctgtctatgatgaatttggcagtatcttgttgctcgttcttgcgttcaaataccgatatgatctgagccctactgatatgggtatctcgaacaatgactcgttcttgttgaaactcttggaccggggcgcttgcagccagaagctgagcgacttgagcgagaagcaaaacaaagatctcggcgcttggatcggagctctgttcattgccgagggcatcagtgaagagaccatgtcctcttgcagcccacacgaattctacatgcttgtgacgacattgttcgatcagagtcttggggcgtgcgagtccggaaagctagatttcgacactctgaaaggcggatttgaatgtaagaaaatcttcacgcgatcgcttccactggatacttagctaaccgccataaagatctgctcgagcccttcctcctcccgtccctagtcgtcgcattgacatggctgggcaatcacatctgggaatcagagaccgaccccacaatccccatcaaaaccctccactccctcgttaaacccaactcaatctccggcgaagcccaagctatccaccaaacagtcctgaacataaccggctgtccactagaagagcaactaaaaaatgtccgaacgagaaaccagtcgcggacagacatcaaaccaatcctcgatgccctggagccatacatctccttccgccgcgtcggcagctgtcgccgctccgaacttgacacctggacgtcccactccgcgggcgggctaatagccagcatccgcacaactttacaagctctcgtcctctggagcgccaacccaggaatcagcatggccccacacgcatacacgcaccggcaggtgctagcagggattcgtatgctgggcgcaacacgtgtgctaggcgcgataatcgacgaagtcaagcagcagagcgaagcaggtaacggacatatcgcgctagacattgcgacgacgatggtgtgcgctccgatgacggagtccttcgccgtcgaccaaaacaactaccacccagtcgacccaagcaaggaggctttaccacggtgcgcgatcctgacgctgcgcgacgccttgtcactacagcacgagaacgtgcccaagatctccgagagtgatccgctacgcgccgaggtcgtggtgcgacttgcgcgacgggttaatatgctcatggcgccgccgtcgcaggtctcgaacatcgacgtctcgaatattattcagaatatgcatcttggtgttgaggggcatgaggatcggatggatcttgagccttccgctgctggtgtttcgggtgatacggtcaatgaggatgatccggataatatcaatcagatgctggataaggcggcggcggatgcggcggctgctgggatggatgggggtggtattggtgtaggtcaggatatgggacttgatcatggggctggcatggatgctattgacgatgtgcttaatgcggcggatatggcggttggcaatcctgagttccttgacttggatatggaagacatgttttagtcgggatggttttatctttggtacataatctatggacttacaatgtccaatctttgcatggcattttgttcgatctatgttttggcgaatgatgattcattggacaacgaaaaataacaattatatcttcttaccggaagaaacagaagaagagaaataaaactcgtattgaccatcaaaaactatcaacagagcactagggaaaagaagaagaggacctcaggaccaaagtacccaactacggccctatcagactgagtcacatgactatggatttccctgcaggactaattctctccaccaatcaccatctctcctagaagaccccagtcttgttctttttttggcagtttttcaattccttcattttgaacacctctgaaatattagaaatggatataagatggaaccagcgtaaggaacatcatgccagactcgctgcacaacccacaagagaaaaaaaaataaacaaaataaaacaccatcaaccccatcgccccataactagcaattcgatcctatactccgcacccaataataatacaccatctagctgcgcctcgatacatcgtcgacataggacctatgactcactcaatcctagaaaccggagtatgtctcagtagccgacgtcgtagttaccacgatgcaaaagcaaaagccatgtacgtacaaatattgaaagtcttctcaactttcccggccagctggggaatccccgagccagggaaaagtttctccacagcttgcatgggggtcgggaggaggcctcgtcggttattatttctaataggattgagtgggactgggcctgctgctgccagagccgagatggagatggtggcgaatattgtagtgagtttcatgttgagctgtcttcttgaattgctgtggaactgaggtggaattgctggtcgttgactccaaggtggaaatatatatatcctgtgtgttagtggtcaagtctacgtaactagtcaatatgctgttgtaggtaataacaaggtatctgtctaaagggtcacttactatttcctgactaggtgactgtagtagtagtggagtgcttgatactcttggattggattagcagaagagagagtacccctttccaatgaccaataatgcctggcacggccttcttatctacatccccgagtttcgtgctttgtgcctgataggccttcttatctgccatcctgggtctggggctaggaccctcatgtcggggaacttcaggcatgggtctagctcattccgatggcttgaaggcactcatgggaagaaggttttccttcggcgtggggaatttgagggaatgtacgcgacggacgtgtctagacttacggatggtgttgagggttgtacagggttgtacatttgatccgctacttgacatctgcagggttgttgcaattatcagattgatacacgcaattattgaatgaagatcgcgcaattactgtatgagacatattctgatcatgctagaatgcacctcttatctccatgcataagattagttacacccctgtcaaagattctttagtgagatgctgttcagtcaagggatacaatccagcccttgaatacacatcgctactagaagttagttccttttctgaccatagggaagctgaatgaacagattgtgaacattcgttgctgtcgtcttgaggatatttatatgtaaataagtatgggcccaagtgaatacatctgagtctgactttcgataattcttccaccccacctgccacaacccacctgagccaagagcagcctgttgatccagtgctccgtatggctccggtactccgtacaatgtgagactagctctcaaggtagccccgtcgtccgaccccgctgctcattgaataatctgatctttagtgctcatctttgtacggagtactccgtacggggaagaagtacttctacactggaagcgctgtcgtgtccaagctcacagtctttgggagtagattgtatattggatggcactcaggagcatgtctttgatgtggttgagacccccagcagccccaaggcatgcatgacgtgatattcccggaagaatatataagaatacccggtttaataccgatgcgtcaattaatctgcctagcaagaacaaattcccccccttactacgggcctcgttaattcaccattcttcccatacaaaagtcgtcataacggagccgagccagttccggccaatggaagtgacttgccgatcaatctccacttgttcaagcacggatcacctttcaaaatgtcggtctccgagagtagcggcgagtcctgctatttcccagagtggaaattactcatttggaactttggtggggatacaagagactgctgtaggtaaacaaggtataggcaaaaagcagagcactattagaacgcttcttgcggtgtaaattcgtatataaaccaactacatttatacatgatgtgtggggggcctggacctacgaacccctggaagtaaaaatcatttcactgcgtatcaattgattcgttagagtttggtctagaggtggggggttacatagacgcggccagtgctaataactgaacgaaatgtcagaaccgttggacctcttcattcaacacgcaagatgttgcgcagacccgcaaaacggatctagacaggcagtcgcaaattgcctctttgggaacgagggcgcatattgcctgattgggaacacggaccgggctagaatccgattagataagacccgggtagatcgggatcgtcagggaacccggttatcgggacgtatcaccctgcggaatcgtcacgctttccgcgtctcggcattgttgattatttcatactaggcataactggctttggcagttcgtttgagggggaactttggtttcgccaaggcgcctcaatctagaactttaaatttttatccggaagacatataaacatatatccgcttatagctcgttcaatcgccacggatgacgaacatcgcgtagaggtttcgaagccactcatacaaagtattgcccggcaatttcagctggtagtgatccaccatgaaacgagaagtgggaacaatcgccaaaacatgcaccatactttgtactgtgatctgcatcaatcaaatagtagccctagaagccctaaaagcctcatggatccagacaggtactccatagaagtcggaggaatcggacctttccggcttccaatgcttatctgttgaggcattattggttagacctggaatacaactagttcactggacccaagatttgcccaaaagtgggttcccttatggaactcggcctttgtgccgcgctttccaggttactttggatctattcataggagtaaaacaacatctttcacattagcagcaatactgaacgaaataatggtaacaaatcgtctcagccaatcgcaggccactgctcaatatcgcccttccgatctcctattccctcggtctggagtcggcacatataataactcgccccctttgcagaagattctaagataaatatgctagtcctcccaatttaattacttctgctcttataataattttttgttccctgaccaatctccactctttcaaagtctcccatcatggagcagcatcccgatgatgcgtcgctgcacagcggatatcacaatgacgaagacgagaagaaccatacgcccgtccacaagctcaacactcacgatttcaccagcgtggagaccctccacggaccccagcccaaccttcacgaatcaaagagtaccgagactctgaacgtcgacaatgaggatgactctccaccccccaagaagaaggcggcggattggcacatgacatcccatgtgatccgaaacgcagaacgggatgaagcagctggcttcaagaagcgcgagctgggtgttacatggcagaacctaaccgtcgatgttcttgccgccgaagccgccgtcaacgaaaacatgatctcgcaattcaacgttcctcaattgatcaaggattggcgccgaaagcccccgctcaagtcgattgtgtcagagagtcatggatgcgtcaagcccggagaaatgcttcttgtgctcggccgtccgggctcaggatgtaccacgctgctcaagttgctcacgaatcaacgcgaaggtttccactccatcacgggtgacgtgcgtttcggaagcatgactcccaaggaagcttccgcctatcatggccagattatcatgaactcagaagaagagctgttctacccccgcttgacagtcggtcagactatggactttgcggctagacttaaggttcctttccatcttcccgaaggagtcagtgtcgatgagtacacagccgagacgaaagcattccttctggagtctatgggaatttctcacaccgccggtactaaggttggaaatgagttcgtccgtggtgtctccggtggtgagcggaagcgtgtttctatcatcgagtgtctcgcgaccaggggttctatctactcctgggataacagtacccgtggtctggatgccagtactgcattggagtgggcaaaggcccttcgtgctatgactgatgttcttggccttaccaccattgtgaccctctaccaagcaggaaatggaatttacgatctcttcgacaaggtccttgtccttgacgaaggacttcagatctactatggtcctgcaactgaagccagacctttcatggaaaagcttggcttcatccacaccgagggagcaaacgtcggtaagtgtttcctgcatctgtcaaaaccccgacaccaactaacacaacgataggtgacttcctcactggtttgacagtcccgacagagcggagagtccgacccgaatgcgaacgcacattccccagaactgccgatgccattatggctgaatacaaaaagtccagcatctacactcgtgagattgcaacatacgactaccccgactccgaaatctgccgcgagcgcacagaggcattcaaggagtccgttgcgtgggaaaggtctaaccacctgcccaagggtagtagtctgactatcagtttctgggctcagctcattgcatgcaccaagcgacagtaccagattctgtggggtgatatgtcaacattcatcatcaaacaagtttgttcatgtatcatggccttgatcgctggttcttgtttctatgactcgcccgacaactcattgggtctcttcacgaagggtggtgctgtcttcttctcgctgttgtacaattgtatcgttgccatgtctgaggtgactgaatctttcaagggtcgtccggttttgctcaaacacaaggcctttgctatgtaccacccggctgcattttccttggctcaaatcatggcggatttcccggttctgttgttccagtgcactatcttctcggtcgtcatctactggatgtctggcctgaaacacactgcggctgctttcttcaccttctggattattctgttctcgacaactctggtaagtcgtcgtttctcattcgatttctttgaactaagactaactatgactttttcagtgtattacggctgtcttcagattcattggatccgctttcagtaccttcgaagccgcgtctaagatctcaggaactgcagtcaagggtattgtcatgtacgctggttacatgattcccaagcctaagatgaagaactggttcctcgaagtgtactacacgaatccctttgcctatgctttccaagctggcctgacgaacgagttccatgaccgcacattcccctgtgttggtcgcaacctgatcccaagtggccctggctacgaagacgtcggagctgataaccaagcttgtgcgggtgttggtggtgcgttgccaggcgcgaactttgtgaccggcgatcagtatcttggataccttcactacaaacactctcaactgtggcgaaacttcggtgtcgtctgggcctggtggggtttcttcgccgtcctgacagttattttcacatcctactggaaagcagctggtaacggtggtgcttctcttctcattccccgcgagaaactcaaggcgcacaatgctgccatctgcgatgaagaggcgcaacgcaacgagaaggcccgcaaccacgaaacccccgatgcccccgccgaggttgacgaagggaatctcacccggaacacctctatctttacctggagaaacctcacatacactgtctcaacccccaccggtgatcgcgtgctgttggataacattaacggatgggtcaagcccggcatgctcggcgctctcatgggatcttctggtgcaggcaaaacgacactgcttgatgtgcttgctcagcgtaagacagacggtactatcaacggttctatcatggtcgatggccgtgagctcccggtttctttccagagaatggctggatactgcgaacaactggatgttcacgagccatttgcaaccgtgagagaagcacttgaattctctgccctccttcgccagtctcgcgacacccctcgggaagaaaagatcaagtacgttaacactatcatcgaccttctcgagctccacgacctggcagatactctgattggtaccactggaaacggtctcagtgtcgaacaaagaaagcgtgttacaattggtgtcgaactggtctccaagcctagtattctgatcttcttggacgagcccacctccggtctggatggacaatctgcctataacaccgttcgtttccttcgcaaattggctgatgttggtcaagctgttttggtaagtcttcaatctcctcaactacaagatcatattgctaacaagtcatgttctaggtaacaattcaccagccttccgcgcagcttttcgctcaattcgatactctccttctcctcgcaaggggtggaaagactgtctactttggagacatcggtgaaaatgcgagcagcatcaagaaatactttggccaatacggtgccgtctgtcctaccgagtccaacccagctgaattcatgattgacgttgttactggtggtatcgaggctgtcaaggacaaggactggcatcagatctggctcgactcccctgagcaaagccagatgatcacggaactggacagaatgattgaggacgctgcttccaagccccccggaacagtcgatgatggttatgatttctctatgcctctttgggaccagatcaagatcgtcacccagcggatgaatgtcgcgcttttccgaaacaccgactacatcaacaacaagttcgagcttcacatcatctccgccgctctcaatggtttctccttctggcgtcctggcccaagtatcatcgctctgaatctgaagatgttctccatctggaacttcgttttcgtcgcccccggtgtcatcaaccagcttcaacctctcttcatccagcgtcgtgatatttacgatactcgcgagaagaagtccaagatgtactcctggattgccttcgtcactggattgattgtttccgagttcccatacctctgcatctgtgccgttctctacttcgcctgttggtactaccccgtttggagacttccccatgactccaaccgatctggtgccaccttcttcatgatgttggtctacgagctcatttacaccggtattggtcaattcatcgccgcttattcgcccaacgcaaccttcgctgcgcttgtgaaccctctgatcatcagtaccctcgtcatcttctgtggtgtcttggttccatacgatgagctcaacgtgttctggcgtttctggatgtactacctcaaccccttcaactacgtcgtcaacggcatgttgaccttcggtatctggggtgccaaggtcgtctgcaatgaagatgagtacgctttcttcgacccgcccaacggcacctgcgcggattacctgtcggactacatggctggcactggtaagggtatcaacttgctcaaccccgatgctacctccgcctgcaaggtctgccaatacaaatctggaagcgagttccttaacactctccacatcaagaactacaccaccggatggagaaacattggtatcgcctggatcttcgccttcagtggatacgctttggtgttcggtctcatgaagttgagaaccaaggcttccaagaaggctgagtaggttgagcgtctgttcatcctttctctcaaaaggccatcatctcctcgggatcctcattacttgagctttcccctttcccgatctttcctcctattttctcactatttccttcttcacttcttccgttccttagaggactatttccccaaattttgccatacattcactacccagcccttcattcatggagccctgcacctgcgaatctcgatcctctagtcatcgagcatatttgtcatttccccgcatacatgttattagctagcatatagactgcatatagatcatagaccataaccatatagaatatagattgtcattctcaaaatgttgaccaaagaatcctcttcgagattaaattgtagcagttagaagatcattgatgtaggcattgcttgtttacatccaatttgtctggcctccctttactcctctaactagttatgattctttgtctttcaatctatgtcgctttgtgcacatgggaagctatttcgaaaaatccatgacagtagtccaatcatcaataattacttcttatttcttagtgacgtactgtacgtgcgtcacatatgtacgtgatatatatccacaagcccaaaagggaaacaaaagcatagatatatttccgaggtagtcgattcagactagtaatatgaacccgtattccaactctccgggttagccgccagtatgagaaatgtacaacatgcgggctactttctgaattttaccaatatccaaattgtgatgaagttgcatcaagactcaggaccacaagctggcgtgtggagatgcgtccatggatgtactggagaaattatccggagagccgagattgtgacacatatcccaccttcccgattaggcagtattcgaaaagtaactccaaaatagaaagcggaaagaaaaaggtctccaagattgtagatccatgattacctccaccgagcgaaaagatacagacccgaatgctcaaggggaaatgacggggtcgacccagcgtcatgggccaaccttggaagaaggaccatttgcatttctcgcatggccgatcattgcctaattattgtaagctgataccgacaacatggaacctccagccatacttaaactctctcattcataggagtacggagtagcttaccccaatttcccctgggggacatgaaaatcggagggacattgcgcgatgctgcacgcgagtggaaactcgcccgatgaagaacttgggatctgcacacgagctggttttctgcaggaactgtgatgagcactttcttgtttgagaaaaaaaaagaaaagaaaagtgcctccccgcatttcccgacaaaaatttgggtggcataggataggctagaatttctcatcacatcccagacacacaagcacgggtattactgtgttgcccaggaagcattgctgatcgctccatatatctccttttgtagaaatctggcttaggtggggagaggcattgaaaaatgggttgcgggtaagaccctcaagctagttgaacaagagagtattccgtacgctgtcatgataatctcgggaaatgtagagtttgaatgcatgctctttgtccatttcgcacagaaaccgtccttgttcccgcctcttttctatcacatcatccagccaagcaaagatcagcagtgatagagtaatagtggagtgaaataataggcgtggcgtcataagaacaaaaagcaaaagctccgccgtgagccttctcctcgtgtacctgtcgggctttgccacttgtgtggtcctttggagcaaataattgttgacttcagacatagtgcccattctcggctaagcgggatccttgctggaacaacaaacaatgtatgagttggggagaaaaagcggatgtgatgagtttgccgttgaagccataaatcatttggttcggcttaagcctcaagtccttatttccacatatggcgcggtgacgggataattgttcataaattgcatcaggtgagacttgtgctatgtcgaaggttacgaaacagaattctggaaacagtggagctgatgcgatcgcgcttgaaactggtaatgtggaggttgtttcatctcgggtgaaaatgagactctctcagtatacttcatagattagttcagtgaagccaaaggaataagttgtaatgattttggaagtgttgtcaagacgtgctggtatccacgtgacacgggcgcgtagtcacatgtttgtttttgtttcctcggcatctgcagtctcaataataggattacaggatcaataatctattctaggttctgactacggaatacggagtattgcccactctactctataaacatacaacatacaacatacggagtacggagtacggagtacatcgtattaaattctcccctctatcacgtcgccagcgcggatgcgagggcgatccccctctaaccgtgccgtcccgcactatacatactgagaatgattcaattagtctaacgcctatcatattgcccctttcatcccgtccccaaaaaaaatggcccaggtgtggggagtgcggtctacggtcagcacattacaatacatataaggaccagcgaaactattgatacaacggcctgacgcgacacaaagttatcaatagtctacggagtaccgtctgtactcctatgagaacgatatgtccatcatcatggtgggcgatcattatacaatatataagccgtacggagcacgcagtgcctggcgcgttcctccatccaaagccaagatagccttcttgtggggcacttcgagtcagcaagatccttcgttaatcgttttgccatggccatctttttgataggccctgctagttttctaggccccccacgcactctcaaacccctgctcattgcgcaacggccaagccgattcaggggcattgacagggattgtgctgttagtcccgcattgcaattcaatcacgtgagacgtcaaacaaagaactcgaacagccgggatctcaatgacgctttgagttgcatgccccgaaactacggtgacctcaaatcagtttcccggtatggaatacaaggtatgtaggttctggcctcgaactctaagaaaactttagaactgcacagccgcccccctattcaaatttgaggggacgttaaactattgattttaaagcagaacgagatagagtagctgtacccagcttagggtttgaaattaattaatactgacagttaatggacttcacaaagtggatttatgagcacatccccaagcccctgactgcgagcctccaccaaggcaaatccgagtcattgtccctggaaccggaagctctcccgcgagcacacgccccataactaggccaaaaagtgaaagggaaaaaaagctgtgatccaattttgggcaatgctctatctacctggttgaaatgtgggctctctggacgcgattatcgcccgtcccaatctaacatctcagatcccgcacaaagagataacaaagaaccatatcgcgcgtggcggtccagccggtcgattctcatctaggacattgcgtctatcccagtccgttcattgtgccgctcgtttgatgcatccgactgcttgacaggtacacggtaacataagctgtcatatacaatctattagtggcgtcggggatgtccaataccgaaaatagaggcgcagactagcccctaatcccggagacaggtaccgtctagaccgtggcgcggaaacgtgctagccagccgtgcgcgtccgccttctagtggctttctagacatcgcgcggaggcctttccggttaacttaggcttggaggatttcattttcgtgtgggtttctccttaaggcgaaatgaactgtggagtgtcataagtgtcatgagtggagatgtgtgcgtagcttctatctttctttgttgattgccttcatatcgccccatctgcgactattcctgggccgttctctttcatgcgccagtctaagtggggtctcgtattgaatcggcgatgtgaaacttacgccgtatgtattgttgaccgttacgatctagcaaattactatacaaggtccggtattatgtacttgttctcggggtactttttaccgctcactggatccctgtactagtctatcaattctaccattttagatggtctagatgtctaggattatctatctgctttttgggctgcttgcaatatccatacgattgtaaagaatttgcggagtacgaagtatactctgttattgaatggatactccccccaccgtgatttcatgagcttgcattatacatatacagtactctgtatgtatgttcttcattttttaactcgaactgtttgtcaatacaaagtacatcctataataaatttaggtatagatgcatgggccatgttacccctgtagacatcaaggtttcgtctttccgctcgcatccatggatgagctgcgttaaatttaatgtttaaaattcgttaatcgggttctttagtgatatacacacgctcaatgtggttgttatggtgcagtatttcaacttgattatttgactaacattattttgagcaagagcttaggctcgatatatagatcaagagggtgtacggagtttgtagctgacaattcacaacatacgaatcacgatacagcgagatatgatcttcgaatatgctctatttcgagattgaactgaatagtctagtaaatctaatagactgtgacacagcgtggttacacaatcgcaatcgtggggtaaaaggccatgaaagaacagcattctctcagccatcaatagaacctcgaaaacccggcgagaaagcataacacaacttcgaataaaaatatagtaaggaaccatttctgcttcccaaatcacattagaccctatagcagaccgactttattgagatcataaccaaaattgtaaggtttgagcgcgatcttgcagccgaatgcaggtacctgccgcataaaactgcagtgttctttcagcctcaaccgttcaccgcatctcaacaaccaaggccacgaggtgacacaagataatctcgaagacttaggccgacagccttcggattgtctgaatgcgcttccgcgtgttggttattggaggttgtgctacaagatggtgaggatagattatatggatgtgtctttcatgttgccaagcaatatatatttgaaaatctcaaggtctcaactaggttgtagtctaatacagaatctttctacgcggtcattcctatccgtggatatatatcggcgagacaagacatattcaactagtaggctactccataccacctgcatccaatagaggctctgtctaaacgaaagctacgtctggaacctcgtctactactctgactgcatagcataattatacatcgctatttggcacgttccactgaccctcggataccaacgtggatattcaagacatctcagatctctagcatgctttcttccagcaattgccctatgaggctaaccatgagtaagattgcatctgaagattagtatcttgctaatccgccgcaagtaagccggtcatctcccatacgagagcagtacgagaactagatcatgtcgcacgaaagagatacatttcggtggaggtatcacccgaggtaatcctccagcaaaaatacgctgacatcacgcagagacacatgtgtctatcaccgaacccattgctgatccggattaacaagactccttcctaaacgggcatatggatgccggtcgggctcctcaacctcggggaacattaaacagaccaaactaaatgtgacgatatcactttcccccgacgatctcttgtcaactagacgggttctgcagctcaactgcacaatggctatagtccaaagtcccttgggagaacgaccgtgcatgccccactacttgggcacgagtctgccggaacgtgatgtgctcgtgctatacagctagctgataaaatcgcaagctagcaagttaagctaatggactacatgcatatgcaggggtgattgatttgtgctgtacggagtactccgtacaccgtaggtaagatcgatgcgccatgagacaagcaaacagtttctctgagaccacgcgggctgacccgtcaattgtatcacgctatgagttgcattgtgcgacttgtttttgtttacagtgtattttcctgagatagtaagagattaagagagacaaagttccgaacctgaccataaccaaaccgggtgtaaatttgagtagcctcaatatcggttcgacgcgatttatatacgcgaccggtaaaaagcagatcatctccattagagatagaatgggacttggtccaggcaccacccctctgccactctgccatggctttgaacccgactactccgtacggcacggacattcgacccattgaaggtatggcccgcagatcgcattttgcttgcccacctaatgtgatggatatagagggggcttgcattaccctagtatgatagccgttggttggacccccacgagggcgagacgttcggagtatttttatttttttggttaagctgccaatgctgtttaggagctctagtcggctcggttgatagcttcgctgacatacattagtcgcacattagtttataggaactatcacattttgctctttcccaaggaggcaaatatcccagaacatgtgacgggcaaccaatgcatgaggagaaataattatgcgctttgcacatttcaatgttgactggcgactgcaggatcaccgagtttacgtagttctgcgaatcggttggtcgaactacgggaggacgtgcgacgcaactgtgatggggaatgggagaatggccctatggatactatgatggtcatagttgtgtattacgagctcgatactaagtgtctttctccaagcctagaccgtgggttattcaattttgcgatggttcgctcaactgttccgatgaggacctcagaacgcgttgaccagatattcgtatattccacctagcgtttatagaaaatattccgaagttcattttaagtcgaggtacttcgtacattctattgcaaggcaaaagtacatcgaattttttcaccggcaaggtactcccgtatctcgcctcgcatctattattattcgaggtcttagacatgagcgggtccgcatcatgagatccccctccacgtactccatagctacgatctagcaaggattgaggatgcctacaacgtatgcaagcatcgggtagcgttgcgacagtgtttgctcaactttttcgcaactcgcaacagccaccgtttgtggatcctgtttgccaattacgaacctgttcctacgattatcgccccacgcgggagggggaaagaaaaggagggggatcgcagtatggtacggagtactcggtacaacgtacatacaaactggtctgaatgtcaatagagaccgaggtctggacaagggggtgagcagggatattgggatttttgatgtgaggtacggatcaccgagggatatggaccctatttgcaatccgctggaaatcaaccataacggtcagaataaaaaaaaggcttttggctgctgtcacattgggggccactgcgttgtcgatctcatcccggagagatattgatgacaggcgaacaaaagacccccgtccgtcacttttaatgattgatcgagtctccctgcaggctctagcacacaacacggtcaatgcattttaagacatgaacctaaccccacaggatttatttggttagggcaatgtgattggtctcagacgggagtagcattccaattctaacaaattaaaacggagaatttgtcgtggaaggtctggaacagagctcggcggacgcaaggtggatagtgagttgatacatgtgagatgtgtaccttttcggcgggttattagggttgaaggtacctcctgacctggtaccgtgttatgaagtgagtagataggccaactcttggggaagaagggctatctccaaggccggtttttttttgttggatttcttctcttgctattactgtaatgatctcaatcttggatcttcttaccaaagataccccgtagatactattgaatacatgttgtctgcacataatcccaaaagaataattagccaaatccaaataatgaaaaaaacagaaaaaacaaataaaaaacaaaacgcaggaattaaaatacggccttcggtatgcgtacggtacatcgccatacgggctcataccaggtggagcgtggatcgtcccgatcgagtcccagaagattcaacctttagccctttcaaactcccaaagagctattattcctcttatttccctcttttcccttctccttttgattcaaagctctcttcattttccactttttgtactgttgctaccggtagcaatcgcgatacttagctatacttagcattctttcacttatatcccttccgcccttgcgttgccttaatagggaatccctcttttccagctttgcgtacagtccttgctgcgatccttagcatcttgccactctccccttcataggcatttgcattatttatccattggaagctgttcatcccttgatattgggacctcgttgcgactcgtcatccctccgggaccttgaataatccggactccttgaaaggaagtctgtttggatctgtttatagttttcgattacttgttaatattgcttcttgtgtttgtatgtccagtgcaaagttcctaaatccttcccctctcctggcattcctagccctcaacctccttgggcgcattccaatcattcaatccctccagggctatactctatactatccttgagccccccaattgacctagattgtgtaggatcaaccccagcctctggcgatctgattcctcccctccatccttgattatccaacgccacttcgcctacgatacttgactttcttttggatccattgagccatgtccattgcacttatcgaataaacgcccccggtcagtgacctcaacggcgagaaagaaattactcagtcacgatatacccaagagatggaatcaatgaagccacatatccccccattgaagatctcgaaatccaattcgaatttatccgagtcgagcaacgacgctacatctataccgattcgatcttactccggctggggctcatcagatatgacccctccgttaacgccacaaaacgcccaggacacaaacatggatcaattggaagccccgaggcctgtctttcacaactatctgcgcgccttctacccttttcacccggctggcaatgtctctccttcgaccgttacactcccgctggaccagggagatatcattttggtacactccgttcacaccaatggctgggccgatggtacattattagattctgggaatcgcggctggttacccacgaattactgcgaggcttacgaccaattacccatgcgtcctttgttgaaggccttgactgatttctgggatatcattcgaggaaacttcgggtcatcactgaaggactttggaaatcaagacttgatgagaggccctatcgctggcgtccgctttctactagtaagtatgaattagaaccgagaaacaattacggggcttatcattccacaggaaaaatcagaatgtcttactcgagaatccgctctggtaaggcgatttgagggactacgcagaattcgaaaggctttgctatctgacctgtcttcgctggtgaaaactgcgaaaaagttccaggaaattgcaaacgggctcccgtcagaagacgaggttgaggccattctggatgagatgcttctcaaggctttcaagattgttactagaggagttcgattcctcgacgtctggaacgaggaggtaggcttgggtcggactatcgccgagatggatgggcccaacgaaagctcaggccagtatagcatgccaccgactcctgcatccgaaactttcaacttgggcgagaacgagggacctgatcgatctgcgtcgcgaatgctggaatcacgaatggaccatagccggatggatatgagtcgatcatcgatgcgcacggagatggttgatcctagaccggcctccgtcgctaccaaacgggtttctgtatcccaccgcatgtcagtctccggcccttcgactgccatcgttgcccagaatctggcatccgaacgcctgggaacaacatatgatgcattcctcggcgtacttggctcattcctcgggttccatatgcagtcccgctcctcgatggagttggttgtcactacacagcaggctgtcgaggcatgcaagcaattgctaaacgtcattgaggtagtatgtgagcatggtacacatcgcagcgcgtttctcgaacaggcacgagagttaatgtgggagaagctatctgagctcgttcacgctgcacgcgacgtgtttcgtcccgcacaaatgccagaagatgatctatttttcatggtagatgaaggaaaacgccttgtgggtgctgcgactgactgtgtccgagcagctggaaactgtttggccaaggctcgcctggtgcttgagcaaattggtgaccttgagcttgaccctgaacacttcgaagaggaaagacaggaattgtctagcgttgcctctccacaagatgaaccgcagactcccgtagaagaagagcgacaggagatgtcacgtcttcccccacctcctcttcagatccctagcacacctgctctcaccgacgctacaacaccttcatcctttcagtctcttcctgcaaattcccccgccaacatcaccgccatttcttctttacctaattctgccatactccccacccacctcgagaacatctcttccttctcctccactgacagtaactaccgtgaaagtcatcccaagtctgatatgagcgaatcattcggacgtggaattacaagcaatggcagcagcttcacgtataatagccatgcacgtgattctgagatgagtggcgtttcccaaacctcgactcgggctacctcgcctgatattgggggtagcttccagggtagcttcaaggttcactcgctgaaggagagtctgagctactccaccctcgccgaggaaaatgaggagactgaggccaacatcctggagaagactttcgcacacgaacttatttacaaggaaggttcggtgatgggcgggagtttgcgtgctcttattgagaagctgactgctcatcaatctacccccgatgccatgtttgtttcaaccttctacctcaccttccgtctgtttgctacgcctcttgagtttgccgaggccctcgctgaacgcttcgactatattggtgagacaccccacgccgccggacccgtccgtctgcgtgtatacaacatcttcaagggctggctcgagtcgcactggcgccacgaccgcgacaacacggccctggagttcatcgtcgacttcgcaagcacacgacttatggcggaccttcccactgctggtatgaggttgcttgatttggccggcaaggtgtcctccgttggtggtcctcttgtgcctcgcctgatatcttccatgggcaagaccaacacttccattgcccaatacattcaccccgatactcccttaccccctcccatccttggcaagaaggagcaccacttgctcaagcaatggaagaacggcgaagcctctataaccatccttgacttcgacccacttgagctcgcccgccagctcaccattaaggagtcacgcattttctgctcgatccttcccgaagaactgctgaacacggaatggactccaaagtcaggatcgttggctgtgaacgttcgcgccatgtcaactctctcgactgacctcgcccacctcgttgctgactctatcctatacctcgaggagcctaagaagcgtgccgctaccatcaagcactgggtcaagattgcgaacaaatgtctagagttgaacaactacgactccctcatggcgataatctgctcattgaactcgtctatgatctctcgactgaagaagacctgggacatcgtatcgcagaagaccaagactgtcctcgagcagctctgcggtatcgtggatgtgtctcgcaactacgcagtactccgtcagcgccttcagaaccacgtccctccttgccttccatttgtcggtacctacctgaccgacctcaccttcgtcgaccacggcaaccaatctctccgcaccctctccacccatgacagtgaaatgactgtcatcaacttcgacaagcacatgaagacagcccgtattatcagcgagctccaacggttccagatcccctaccgtctgaccgaagtcccagagctacaggtctggatgcagaatgagtttgtgcgcgtgcgctcaaacggcgaaatcaccacacaaaccttctaccgccgctctctggttctcgagcctagagaagcctcccgcagcgcaaacaaccttcagtcccagtccgagcccatgccttccatgcttgacaatgccaaggacaagttcgacttcctctcatggaccaaccatcccaaggcgaagtccgtcccgacacacggataactcactcactactatacaccatcacctatcccatccctcagaacctaatgactgatgacttcttcttctcattcccactttactggtgtccacatccacatcatcttaaccattctattatgcatacgtgcatcaattttctcaaaacccatcttcttacgatttgtgaatatcccatcattcttgtcttacctttttactttttttattttactcttgggtttcttgtgtcttgtttttgcgatttctcgttcgagagatgcagcatttgaaaaagcggctatgtatggaacggggcctgggactacccaaatggagtttaccaaaggccttgctctgttatgtttttttagtttgatttctttcttgtctggtctgttcttatttcggctggggacgggggaaacaaggatgggactggaaaaatggtttcttatctgtcaactgggcgttttcctaatcggataccctctagacaatatttcggcctcacggcttttgtacaggagcaactcttaaaagctgcctgaaaaactgaaatgcaacatacgctttaattcaacagttttcttctgaaccattgtaactgtagactgtagactgtaaatgtacctctgtctgcctcgtacagtgccgacgtggccgctatgctgaattttcttcagtacatgtaaggaaaatgttcagaggatctcggttttgaataccagagaaccccttcaccgtatattccagccgacaaaccacttcaagacattcagatgctcaggagagcctaaatttttctcgacaccagcactccggacattgaaaataatacttagaatgccaatggctgaccgcattatcccacatttcaggttcgacccccatttccaagtacttgtcttcgtagccatcccagtactgtattcgtcgtgtgcgataccttaggcagtcgcagcaaaggccaatatttgcttcaggtcgaccggaattgtcacggggtgctattcgccttaggagagtgaatatatcaacacaggttgatggtggaagaaatctgtgcttgggtactgatggtatgcgaattcggacaagtgatgagacgtgtagcaggcgcttgcatgtcaacgcaaggcacattcgatccagatgttcacatttgttgaggatatcaacgattagttcgggaggtaagctaagtagattgcaggtgatttgtggttctgctacgaggatctgagagggattagatagtgaaggacccgtcaggaatttgagtcggtctagaagtgctcacgttggatggccgcttgaaacggtgccgacaagaatgagtggatgttggtaatgctgacatcgtatcgttatggtgggcaaattttcttgacgcgccagggtgtttgttgacttgacggcgcgaaggagcagagccgcaaaaggttaaatgcatggttctgtggggttgatgcctgaattatagaccgttcaagacatgattcgggacctgggtgcaagtttgacaactcttgattgatatatcacctactgtacacatcgtcatttcgtttaaacatattttgcattatcgaaatccctaattccctatacaagagccttagactaaccaactatgttacataacgtgttctaaacgcctccacgaaattcatgccgtcattgtcatcataagcagatgcaccggtatccaagtcgagcggcaatgaaacagcagtctcggagagcgttcgtaaatcaagtataggaatcattgaaggacggccgtgggcgcattgaaacgggaaggcacaatcggccagcctggagaccaaggcctggcactcttcgatgttcaacgagtcattgaacatgatagcagtgcgacaggcccgggaatttaataggtccacgatgccttgagggcatccattcatatgttgaacccatgagcgcgaggcggacgattttagggttcctttgtgtacaacgtcatcgctgtctgatagttcgatatcctggtcggcatattccgtttcaaatgccttcttcgactggaacggcttcctaccatcttcctcacttgaccaaatctcacgcctcatcaagtcaatcaacacgcgaggctcgagccgacagcgttcggctattaggacagggacagtgtggacggtgatcgagacagtagatttggtttcgccttgtgtcacatactcaataccccaggccgagaagagagccatatatttttggaagaggtcaccctctgttgacgaaacttcgaatgctagagagccgacttggacagtccgcactcgacaactcgactccaaattctcacccagctcagcagagagaaacatctccttgaacaactgttcgattcggcatcgctcatcggccgcgtgctgatcgattaagagtagaacatcgtttgatgtctcctccaaattgggaatgacgggagtcgtgtggaccttagccaagatgaacttgttgtccacctgggctatcacttcggcagtctcgagcgcacggcgttgaagcttgcctcgatatttggcaacttgcgctgtatcaagcgatccaatgcctttgaagcagccgtgcgaagaagtaattacattctgctgaccgacggactctgcgcctagatttggtattggcatttctgttcggctgaaggaaggattgtcccatttccctaacagattttctatccaaaatgtttgcactggatgcttggacgaggcgttggcgcaatcggtggaagaccgatgggtagctaatgacttctgggcgtccatcgtttggcccgttcgagaattaatcatataggccatcttggtgtatggatcgatccagctgatcatcttgtctgatggcgagtctccaggcagatcctctgtcctgttcctgtcctcaccggagactcttttattcgggtggtttggaataattctgcactcctggccatcatttggatggtttgacttatggttagggaggatcggcaaggagctctcaccctgtattatattaggagccgcatgggaaagccgagatgtttgatgggttggagaacgtcctttgggacccttagcggcttttatcctggaccagttgtcgaagctttgaccagagtttagagactgtgctcttggaaaggaggggatttttagacgaccgctgaacacctcttcggtgctagaaatagaccgaccttgttgtagagggccacgagaaccacgagaactgccagctgctcgagaggctttggaacggatactctggttttggtgtgataaaatggtctgctgtttgcggttacgagggcggagattgtgttgcttcagaaactcatgaaccatggccccaagcacatcaactatacgctgaaccgatttggccgactctggaagattcacagacgcatcgtcgcccaatcgtataacagcgtttgtgtcaatgcgaatgtaaaacattggccacttattgacgggctttgcccagcttcgagtgcttgcgttacttggggcatcaagctgattcaacgaagatgagcttctgtgggaaatggctccaacattactgaaatcagactcagcaaatagccgatttacttcgtcataaagcacatttgtgctgttgcgcgataggatggggtctttccccaaagagatgaactgaaccttccgacttgggctgggttggagagatattgctccccgaactatcaggtcagaaaccgaggctgaaattgcatgccaagaatcgaagtttggtgatgtgatcagcccggattgtgtcagaattgacccgacacgtttgagatcaaaatccttctgagcatgaggaatgcacgcttcgggtatagaggtagttccaagacgaatagaaatccgtttatttcgttccacatcgaggaggactaattttgagaattgagggttggctaaaaggagagacaccaaagagttcctgagatggtcccactcccgttctagctcgtccggccgctgaagagtgagagctcgactcttgactcgaactggcatgttcccaaaaaggtcattgacagttatagatgtgccatggccggcaaagcgaagcacctggtgtggtggtgcaggggttagccgagccacaggtgtcgaatgatgaagtatgattgagtttgtgcatccatgatgaatgtgatgagaagtcacagtgagcagagacaccgaggccagggaagccaagaacaagccccgatggccatacaagccactcagctcgaatttggatgtatctatcgcatatgttagctagcataaataatcctaaggttgggagacatgcgatgaggtttgcctagccctccggtaacttcaaactcggccggagggattccatcaccatcatcttcaactatacagccaccacgcttgaaatcgacagtgacgaagacggtatgtgcattggcatccaaagaatttttgactagctccaaaatgacaccagtcagatgcaaaatggatgtagatgatttgatctttgcaaccacttcagaaggtagcgcttgtatcatagaccgagaaggaggcattgacgcagttgtattcaccggggcattgtgccactagatgcaagaaagatcccaaaatggatcctggaaacagtactataaatacgcatttcaatcatgatcacctgtcattgtcgctggtagaacctttccaataggtaccagtcaatgacttgcgaaaaataaaacgaccgaaatgttgagaatacgtcacacaatagaagtcgagaggcaatatcgaaggcaggcacatgacgtgcgcggataaacagtctccccgcccgctgccccatctgccgcggcgcgacttgatgcccagagctctacttactcccctgcctacctttgacatttcgcaagcaagagtggttagtgactaggctacctctccaagctagaatgactactgccgatggtcctgctagggtgcatggtaagtacatatgtacagattgtgcctgttggccaccgcgaacccctgctaagggattcatacaaaacagaccggaatgcacgtcgccgcccattctcgaactgggtgaaacgcctggcgaaccttaagagctcctctgattctacgacaaatcgatggaccaacaagcgctccacgggcaataagggcaagaaggccgaccaagaaaacaacccatacccgctctctggaatcatcaaccgtgacacagggactcagacaccgaccgactcatatacagatgatcattatggtacaacatctcgctccagaagcgacccatctttctgttcgggctatgagaacccggttcccctgacaagtgcaaaatcagctgcgccaactatttcaaccaacggcgatgccgcagtatccgaagcagcgtattccaaggctgggacattggcaactggcactgaaggattaagcagccatggagggggtgagggcagcaccttctcgtcgccggcaccttcaattcgatcgatgaccactaccctgaccactgtgcactcggcagcaccctcaacccaactgtacaatgcacaaaacagccacaatgggcaccaccatggcagctcagcacagagttcttcaaaccagcaggttcaattttcccaccaattcccttcaacctcacccgccactgcagtcccctcgcacctggcaccacaaagtcatgcgatgacgtacagcgctgcaaccgcgaacaatgctttgaccgataacgcttctcttctcaccttggcaagctcatccaagcgccgtcgccgcaactccctagataccaatgcgtctgtacgcgggttggctccgtcttctgttttcggcgggagtcgggagagcttgccgctgagtgttctgagtggaaatacgactgaagcatccaatacctcagtattcaatgcgtcgggggtactgagccgaccgagtattgttggccttgctagtgctgaacgcatcagtgtctactcggcctccggagcaattccgctagccaccactactgcggagcggggcggcttatacactactaagcaaaccgtcggcggtgatacggccagcattcgcagcgttgtccaatcgcacagccgacatgacagtactggtgccagtatctccgggggtattagcagtccatatgccgtggctggtcgcatgagtcgaagaagttctggctggggagaaattaccggcgaggaaggtaatgaaggaaagccagttgagaaaaacgaggatgaagccgcaattaaggatggtaacggctttcccgttgagcggcttaaggcatgattccacttcgcacgtaccggcataccttccagtaacgattgaacggtgaggtgtgcttgaatgaaattccggatggacatttcgaaagcttgagcgaagtatcagtgatccgctactacataatgacttgatgcatggcaatcttccaaggacttgggtattcttaatggtttggcggcgttttctaggcttggactttgataccctatgcggtatggacaaattatttctactcaatccatattgcatgcaactcagatctttcgtgtattcattagatctccctagagtccgcttcgggcgtttttatctctacctaccagttggccctcggacaccccttttcatcggcgccgaatgaccatgggcatatcgtactgatacacgaaccaggcattttgatagttccattcatgcttggggtcgaccaattgaatctataccgcgagttagcaccaaaaagctggaatccaacaaacgccaataaaccactcacatcgaacgaggtgtacagcgacgcgatcagctttttgatctccaacgtagcgagataccggcccatgcaaacccggcctccgccgccgaaagataagtcgacagtatccttcatccgacgcaggcgaacctcgaagttctccgggctttcgtccttgccctgcagccagcgatccggattgaagtcatccgcatcatccccgaacactccgaaatcacggttcgtgacaaaggggttaatcccgaccttagtacccgcggggagatatcgtccgtccggaagcgtgaatccaccctctggaacgatacgctcgaagatcatggcaataccagggttgacgcgcagggcttcacgaatgacggcatccaggtacggcaagtcgcggatctccttccagggagcgggggcagagataccggcggattgaagttcggcgacaagtctggccgtcgcagcaggtgatttggctaggtagtaaacggcagcacgcatggtggctgagcttgtgtcccctccagcgagaatgctcagcatcagccagttaacaatttggttgtcatcaacgagatcggggtacgtttctttcagctgcacatatttgtcgagcgtgtgatcgacagtaccggcggagatttttttctcagcaagctgggcctgatactcggcgacgactctgaaggcgtagaggacacctgtcaaggtgggcttgggcccaatgcgcttgattgggttcttgtcgaggaagttgtcaacccaggggatttgagagacctggtgggacgtatcagtcaccctccttgcttacgctgaatcattgatatcgcagttcttaccggtgcgaagtatctcgggccagcagtggagtctgtgatcaaattgtcgacatccttctcctggtcaatgaatccatagtgccgaccaaagctgtaattggcggtcacatcccaggcgactatgtgatgtgttagctgaaagctgcgcaggctgctagggggcatttgagagctcacagaaaccaatccattcatctgccgggcaaacctttcctgcgttatcaccatcgacaaatctcagcgcaagcttgtccacaaactttgttattgtttcatcgatgaaaggctcgtattccagaaccttagtcatggtccacaggccccggataggtcggatgttctggttatgccaatcttcatcctgggtgttgaagagattcgacattcgatggccttcaatcagtacatcattggggcggtacatatcactctttactcatggttacgactggtcagcatggcctattctcacatctaaaaggacggcattgactaggagacgatatatccaacctttttccatggattgcgagtggaataaattgtccgaattagattcgggtctgatatgctcacgcaattgggcccgacctgcaccgctgtgccatatttccgatgtaattgaacattcttcagatcaatacgtccgccatatgcatgagccgcacgccaaacatcagtgatcttcgccaacgccgggccagggatggatttcaaacgcgaaaagaacacatctgaaatcaactttgtcacaacaagcaaacccagagtggccaaggcctgggcccacaggctggaaggaagagagatcatgtccaacgtgtataatgtgcgcgcacggaagtcagtgcagtgcagtgcagcaaggggattccgagtccaattcactgccaatagttagactttcgagaagtgcaacacagtcggcagttgcagcttttcaatgcccctcgaagcccctaacccctagggctgctgagataacggcaggacgcgatttgtccatttttcaacacgagcggggttctttgcgggaaacaagtgaaagacgcgaagaagcgccaatgattctccaatgatatggaaattatatccaagtgggctttagctttcgtattctggcgcgggtggacggaatgtggagtcggtgattgattgtcgacggctatgaatggctcttcgatgacccgactttcccaatgcggctatgataaccttggctctagagcggttctgccctagcgcccggaagagataccatggatctgtaacagcctctcgttattgtgatagatccaccgccgccactaccattgtaaccgagtcaatgcacaatggcatacttgttcgtaccgggaaggcggcccaagttgaccgatcgcatcgctttgagatccacttgggaagtatgagtcccacttgctgtgacaataattaactttttcagacttcgcccctgtcgtatttcatattgtcgggacgttttagtttccgagatatgacaccctgttgacaatgcccatgcgcttgaaataatccgtggtgtgtccacatctggggacgttggatctttaaaccgacgggtataccccggactgtctgcacagcattggtgaatactcagaatgtcgtctagcgggggtgcatctctcctaccggagagccaggctcctacagtgaagggtgtgatgtggacgatgtcgatggttcctttggtcttcgttttcctgcgcttgtatgtgcgagtatacatgcggagagtgtttggctgggatgacggcattgcaatcgcggcaattgtaagggactccttttcgtgactgactgacttggatgatcttgctaacttcaattcccttggtagggttgtctgattggatacgctgctgtctcccatgtcgctgcaaacctgggattagggcaacaccttgaaattgtccagaaaaaccccgataacctcatccaggtggcgctcttatgcaacattggcgaatctctggcaatcattgcatgcaccctcggcaagacgtcctttgctgtcacattgcttcggatcgtggtccgcagatggatggttattttgctatggttcgtgattgttacaatgaacattgtcaacatcttggctgcgctctttgtcttcctgcaatgcaaagatcctcggcatctgtggaatccgatgatcccatcggagtgttggccgtcgcatatctttacgcatttctctctctttgttggtggtgagtctgctcgcagaagtctgctttggttgtgattgacgactaacacgtaaactccctcagcttattctggagcacaagatttcgtcctagccctgctaccatggacgattgtgtggaatttgcaaatgaagaagaaggaaaagcttggtgtggtcgttgcaatgagtcttggaatcttgtaagtccttgggcggaagcccttgcaaacctcgaaccgtcccacatgctgattgacttatctcttcaagtgcaggcgcagcatccatagtcaagaccatccacctcgtggccctctcagccaaatccgacttcacatgtacgccaccattgttaccttcttcgtctcttgtcaggactaatttgctttctttgcttaggggaactcgctcccttattaatctgggcagcagttgaagacggtctcgctatcaccgctgcatctattcccgcgcttaagcctctcttgacaaggatgttccccagcacatcagcggacagttataacatgatcgcgtatccaaaacagccccccagccgcaagatattcgacaactcccagggcgaaacgcagacggatattggacacacgagtgttcatgacacgggaagtcaaacagcgatcctagagcctatcgttccaaagggcgaaaatatcaatatgataaccgaggtgtcggtgacctataatcacggctcgtgaaggactttgagacagaagaatcaccacaagcaacgggaagcggtcgaccttaacatgcgaatataattactctcaatagacgatttcatctggatttcatgaccatagaccctaattgtttgtctcaagtcgtaaccccgttcgtggtgcgagaaggtcagggtaaatctcgtggccctgtatgatttgtttatacccacttcgagtatctcacttgacagtaatctgagatgttgaatttaatggaagatttcttcgggaatgaaagatgagagatctgggagaggcctaaacagtgcaacgtgatatgccaaatatataacacgtggagaaagacctagttacaatagttggaaaaagtcactcaagaggaaaatatttagtctgctggtgctctccctaacagtagaaagtcgaccgtgattatttccccctctgcatcgttactatccccgtctccaaagtatctcgtggttgcttagtttcaaaccagaagctgcccagaactaaatagcgacgacttggtggggaccgtaccaagcccggtcgaccgcatgtaacaagctctgtcattaccgtctgttttccacatgaatcgcacacacttcttagcgcccttgtagttggcgcacttctcagcgcagtccttgaaagagttcgccctgccagtacccaagtctgctggtccggggtcatcaactttccagaagttagcatggcatgtccctactatgagattttatagggtagacaaacgcttagcatagtgaatcttgaatttctcgtttccagccgtgatgatgcattgatcgtcgcgaagctctgtgactcagtggtcagtatcggttgagcagtgaaatgcgataccgcgggagtcattgaattttattacttaccggcgtcgaaaaggtttgtgcggcattttccatcggcgccttctccgttgcaattaacattgagagcatcatacgactgctggagtgtgtctagtttgcctttgagcgatgtgatctgcgagttgagggcggtgatctcatcatttttattggtgagatccagagccaatttgttcttgtcgttctcgcactgctgcttctggatgctgaggtcgcccttttctgattcacacttatgttgctccgcacgacattcttttttcttctcttcaatttcaccagagtggcgacggcagtcctcttcggcactctgggccgtcagcttgtccgcttcgcattgcgccaatttcgctggatccacctggtttgtttgacatatttcgaggttgtgcttagcttgctctaggtcattttgacaggtgtccttgctattgtcgcactccttcttatcctgaaggcactgttccttctctttggcgcattgttccttctcctccacgtacttttcgcactgcggttcgggagtcggggggtcgatattctcgattttaacgattgacataaacttggttgcctgctgttgatctttattgctgctaaggacgaagaagcagttgccggctttgtgatcacccagtgttctgaaggaaattgcctcgcagtcctctgacgcgcagagcgaagcacattcgagggcattggccgccggcctgctgattttattcagcgaagacaggatagtcttgcaagtccatttccaacggccattaccaataacaacctcgtcttcttgcttgtctggattagagcagcatgcgttacgatcatccgactccaaacaggatggaaatacctccgtaaaggtaatccactcttcatcggacctctgatccaggttgtctcctaggacaaagaagcagttgtttccgcggggtggcttgccgtgtgccttgaaagatgatgcttcacaggacaggtcatctgcacagagtgatgcacactcgtgggcattgctgactttttgggctgttttgggattgagagaccccaaggccgatccgcaagtgaacttgaaggtgcggtcatcaattgtcacctcaccagtgggagtgggcgcaccactggtacagcagtcattaggagtagctgaggacaggcataccgagccgacgccgattgggatttggttggcgaaggccgaagccgcgcctagcagcaagaggaatgatttggcagtcatcgtcaatcaagaaacaaaagaaagaactgtctctggttgtcgcagaaaggcaagaggaattgcaggtgctcaaagcttgaataaatagcatagcgacacggccaggtcctccacaaccccttttctctcccccgcgttatagccccactttgatattaagacatgatgcaaagtactactccataagcgatcattaaggagagaagaggtgtcaaaatcatagatcgagtgataagttacattggtggacctggaagtgggtagctggagtgggtagctggagtgggtagctggagtgggtagctaggactctgggatggccagatgattcggttcagctcagcttctgcaggatgtggagctggaaaattgcagatccccagaaagcctaaaaggagaagataagccaactgcggaacgaatgaaaaatcggtaaatggccaattttatgcaggcaacaaaagccaatataagcaaagtcgtccgtggtcgctagttcgatgtgatcgaccgctgttatggaagaaacatctaagaatatcgatttgctgggcactgcctataaaaagccctaataccgccttccggatccgtcacgcggagtccactttctaatttccggcccgttccgcggggaaccggtgggtcgagccttccaacttatcaataacgtcatgccagggagtacgtacagctcccgtcagatagatgcactcaacaggagaacgctataggctgaccttgtgcagcatcggagtgagccaatcagttgccaatggtgcagcagatggctcagctgaaggcggcctgtcctagctgagccaacctgcagaaactagtgtcgctttgagattttcccaatggcgcagctgccgtgcaaccctcctgatcccgtcccctggagaaactatgtcacattggagtcaccctttcgtcccatgatggataggccaggtcgccccccttgtgctgacgtcactttcattaaggttcatggtcgcgtattggctcacaatctgtcggtatctttttggagggcaattgctgggtgatacatctcctgtatttacagaattgagctgaactgacaggcattacgcgtcaacggacgcgatggggctgcctgaaagcggcagacaagaagggggtgtcttcccctccacctaaggatataagtacgacttgaatcgatgaatcgtgaccttcatccttttcccaaagcaatttggtctaccttagctcagcaataactcaagtgactcgcgacagagatcttcataatgacggcaaaccttcacactcatgcgaagagcggaactctaaatctgaagaacattgtccaattccttatccaggtagaagtcaatgacgaagatagctatggtgatacggcccttgacttggcaattcgaaacggccatgttggtgctgtaaagctgcttttgcagaacgatgcggatgccaacagagtatcttcggatggcaagacccccctctatgcggccacgcaggcaccaaacagcggtcgcattgtcgagcttctgctcaagcacggcgccaagcctgatgagccggtctcacagcagaaaggtgacaccccgttgatgtcggcaattcgactaggcactagccccgaggccatccgtgccctcatcgaggctggagcagccatggataggccaaatgaccttggagaaacgcctgcgagccttgctgaaaagtctaccaacaccgctgtctccaaggctattcgtcccaaggacgataagccagcgtggaagcctgagctagagaatcttctcgttagctccggtcttttcgccctggcatacttcaaaaacttcaaggacgtcggcataaacgccataaatcgtgttgctgcattggcggagccattgccaggcgtatgtatcttgtcatcgacattctctcatttctaaatttgcctaatcccgaaatagcaaactacgtatccccgcacggtggaagagttcaagtcaaaccttcataaattaatcaagaaaaagggtcttgaggacttctacccagagggcaatgaatacgtggccaaggtagcggagaacgcattcaagatcctgaacgattcaaccatcccgggtgcaacacccaagaatgtgaccatcatgtcccacctggcgttgtatcagcctattctatactgcggtaagccaaagtcatcacatcgcatatgaacaccatgcttatactcgttgcctctagatgatagtggctcgatggatactgacaaccgcatgagccttcaggcagccatggttgaaaatatggcacatctcatcacggcggctgctaccgaggatcaaaggcttgttcatcttcgcttcatcaataaggacgacaaatttgataatctcaaccccaacgagctttccttgaagatgaatttctccccaacaggatcgactagactgggctcgaacctgaaagataaagtcttggatgactttctctatggcccaattaacaagggctatgtgctctcgcggccccttcttatcctgaccgtcaccgatggagctccaaacagtgaagatcctgatgcatacgaaaatgaagtcagggcatctctgaactttgtgaaggccaacggatacggagacgaaggtaagctttggtcgtagttctacgtcgacgataccgctaaccctgcatagccgtccgttatgaccttagccaggtgggcaacgcgcctgaggctactgcatttttggaaagctgggagatgaatgatcttgtccccaacaggatcaacgtgactgctggtaagtgataactgaagtaaattagaagtaacatggatcagtctaactttcaaatacagaacatttggatgcccagttcgagaacttgagagacaaccaggctgatctcaataattgggtacgtcttcccgggtgttctattggattttgacgcactactgacgagttcattttagctcctggagagactcgaagagctggtcaaatattagatagtgtcttgcagatggaaatgaaaggtctcttgactctcattgcgatttttgtattcattgcaggaaatttgaaaaagaaaaagtatccaatctccccaacaactaggagtgaagcaatatgcggccacaactagatatataccggagcgagttgaataagtggtacttagaagcaacaatgaataattaagtaaaaagaatgactgagtctgttcaagctagacagtgtgccacggactagaactgcttcgtcgagatatcacactgttggtggctagctggggtgggtccgtagatctgaactttaactacctactccgtacctatccttgcgtcaagaacaggagaacaatatttgatctacaatgtagtatcgaagtcgaaatgcgatagcgtattctcgggggaccgttacgtcccaagtctaattaccaaggtggccgtaggctgatctcgaaaaatcgatatgacactatcattttcaccagattgtggaggtggagtactacttcacatacatgggaccatggattcgaggtgccttccaggccacagttcaacccaagctcattccttcaattgtggcaatcttccatccttcgttggtgtcatattgctgatctagctcgagcagcaagtccagcagggctattcaacagattagtatcaagccgaaggataattggagtggacacatacttcatcatcgacgtcgagctgtgtagacacccaaccgccctggcagggataagggtcatcacggcaggtagtcaggcaggtagggtcatcatcggaagtggcatccttggcccaagcactagagacagccaacgcgagagtggcaaataggaaggttgagaactgcatcgtgacgggttgtttaaggtcaaaattgttttggtcaagtaggagaagatgtaagtagacaaggtaatggagtgagtcgtgactgtagaggttatttatatgagcttcatatccatcctccagcttcagctgtgctgtaatttctctagccatagatgcatgatgtataagacttagctattgagaaatgtgggccagcgctagcaacattctccaataaaccgtatgctttccacgtaaggaactggggccttttttcagtgtagctgaatatttggacaaggtcggtcaataaaaacttaaaggtgcattgcataggtctctatatcgctctcgactgattggtcctaccaagatgcacgataaatagatctacggctcaagttgcaccgcatgtaggtatgatgacgatcgaatgctgcaaggtcgcctcttgccccattccgttcacggtggaccgttccgtgccgtgcaaccctttttctttcatttttagggccctgcacagcactggggtaccctcgtcattgaaaattctacgcaaggtttggggccactccgttctgcgttctactacacccttgatgttggggatcgccatgaaaatccatggttatactacatagaaaaaccacaaacttaatccttttggcttttaccgcggcgtaccccggaaggaagggaagatatccataaaatatacatttaagaagatcaccgaagtgactaaaatgactaccgaaattacatgacatgacacggccggcttactatacttgtgattcataatttcggaagcgatcatcaccacatatttcaacccacatcttataccagtggtatccacggttctagatgggcaaaacccttagacataaccgcatgcgcgtgtcagttacccacacagtactcggatcaatgtccaacaatagaaatctcttagtagaatgccgtaacaacatagtttggtctcgaccgaggaaaaccgggctagtacttgtgtatagagtttcttctttgctgttaccggaatatgatcaagtttaatgctcaagtgaaggagaagaatggcgtaatcaggtcatgttccaaggtttgctaactacatagttaccgacagagcacccaactatctaccagcaaaggttaaaggccaaaaaaatcccagcagcacagcatatcattgtcaagtggacgtatgtggacaaactaatgtacccgcttatttgcaaagagtgtcctgcattccagaaatggaaggagcgaagaagtactcaccaccgcgagggatgacccagcgttcgatgggaatgtagtgcttgttcggggttggcacgggcttctcaacatcgggaaagtttgcaacaggggctgggtgctcgtatttggtaacatcgtcctccgcgcggtagtcgggaggcatttggccgatgatagcgtcgataccctggggcgcgatatttcccatcttggcagtgaaatcaacaggtttatcctccttgtttgcccattctgcagagctgttagtcctcaacgtggttgtaaatttagcgagaatacagacctttctggacaaatcggaatccgttggtgatgctgctctggtaggaaacaaacaacagaccacgatcatgctgggacacaccgccggccttctcattgttcagtgtcagtggtccgtagggaattccccgtcgcaacataagatgcttctcgtaattggggaagtcatctcgaggcccacacttccggatgtgggcagcgtaaggacatttggtttggtcctcagggttgtaagtgaaggcatccgtgtgatttatctgttccagctttttaaattccgcttcggggtctttattctcctttttccactgtgtgaacaacttcttcttgttctcgataggatcggggttcaacataggcgatggatcttggtctgggtaaagttcaagcggggctcctgtacatatcaaataagtgaatgctgcaagtaaaggaatacacagcaagcagacgatcttaccgttgggccatcgtccaacaacacgggaggagaatttgcgaagctctgctgcagatcgttcgttaatgccctcagcgaccactttcttagtgttgcgggcacaccaactgaaagtgacatgttaagaatattgtagcagaagaaagccaaagaggacacgtacgcgacgaactcgggtgttctctgttcgtatgtgcggaacaccatgaagcttccctcgttggcccaagctgggtgattcccttgatcgccttcgcctccaacaagaatagcactaaagaggtcgtcagcgactaaattcactgacacttggtgtaaaaagtctagagcttacccagcctgaattggcttcaaacccttcttggcttcttcgacctttgcatcggtgtctagaccaatgacaactggctgggagataccatcaacccatccaaagctaaaccgtagatgttagtcttgcaggatttatgcaatgcgcctgaagtatcatactgttctctgtcatcatcaaggacatgtccctgctgccggaagacaagttggatacttggctttggcttgtcgacctcgagaccaacttcgaaagtctgctcaaccattttgatggtatcgactaatgtcttctcactttcaccggttatagtgaagacaccgtcgaggtatccagatcgtggggtgaattggtggaaccaatcatgctggtcatcgagaccgttatgctttttcttgtcatctccctcaagggggtaggtcatatcctcccactggccgttgttgaagacatcatcggtgaatgcctcggctccaagctggcatggtttagcacgctcttataatcaccgggtagtctcataactcacctttgctagacctttggcagagaaggcaacattgatggcagacatatggacgagacctttgagagtaccctcttccttcttctggtagattccttttctgaatctctcagcatcgcgggcagtcgtcagattaggaataagggcggccaagtgtttcttgaacagctcagggttagtgatgcggaagaagacaaaaagctcgtgcttcttggacagacggggcctggaattattagaatcaaatccgaaactggaataccaagaagggtattgacttaccagatgtctccctggatgttcttcttgttggggggtgccattttaacgactaggtcaattgtttccagttgcagtcgttctaggaaaagacttttgaggggtgaaggggcgagggatatgcagagctttcttataattttagctacaccatacaatggctaatgcttggaaatcgggcgaggtcgagacgtaagagcatgccgcggccaagcatcaatgatgctgctactacatactccacgtagcatgagctgcaagcagattgttctttcgtatccatctacgacatagatagactaatcacattccgtgatgtaaggtggctgtcccgagaattactgtacaaccatgcgatacaaatcgagaatatcactgtaccagctgacattgtcccatctaccgtggctgcctgtgaaagagaccagaatgacgtgtttagatagaaggagtcgatccattccccaacggagcggtccgagtttatgtagtgctccacattgttgcaataggcatacattgatgcatcgctggagacatggaagtgagatattcgcagctttggtatggtagagatactgtacacgatcctggcatatgcagtctggatactacattatctcctctgattggaatgcgacccaaccacgtctagtgcctggagtgcactaaaaactatctggcctgaaacgtgcatctcctagctattacggtatatcacatgtacctagctagcacctatcacctttcaattattatcaattgagcaactgcagatccagatcggccaaaatcatgcagcgaatacataatgtgacttcactacgccaatcgagatctgctgattctcaccgccaccaagtgaaaatgaatcgatcgaaaagtaaaaagataaatgcagacacatagcgggtctcggtgtagctactggatatgaacatgaagaaatatagaactgaaaataggtaataaagttcaatgacgcctaaaaaagtgagaattatctacgcctagagctagaagatacctagtagatttgccctgcaagatactgatcgacaaccgtatcggtgctgagaaactatgccagatactcaccgtaaatctctcccggaggatcaaatttgatcaactcacggtcgaggtactggattggacgagtcgagtcgggtcaggctggcgcatgatacagttgaatgaaaagagctggagagtagttggtggccttgggccgatagttaggcattctaggtatctaatactcgatagacgaaaagagcaaatagtaaccaggcaaaccacttagttactcacccataaacatggtcaaagctatatcaccaagacagcgggatctgatacttctcccaattaccaggagtatcagcgtccctgaacttctcaattccaccagcaaccccattctcatccacttcccaatctcccatttcaaccctctctgcccaattcaacagcaccttgtaaagctgagcaccatgagtttctcgaatcccattccaaccacagacttgataaagtttatgaggataatctatcagtttatgactggcatataatccaatctgctccctaatagtatctcgggcgtatcctatagacccgatgcgactggtaagaagcagtctggacatattcccggagtcctgcattctgcccttgttaatttcttccgtgtataaaccagcagggatatcaatattatccaaagcccggccccagggtgatagattggacccatctgctcggactaggagaaatggcatttcttcgtcgttagcctcatcgtcattttcatccggttcaccttgacctatagtacgacaggctacaaagggctgggttttcaattcagcaacagactgtatccgggttcccggagcaatgtagcggaaatgaatctggcgcacaggaagcgcggagcaaaagcttcatcaagtaccgactctagaaattagacatcgacccgggctaattgaaccgggagtagagtttcaattgacgtgagtgaacgcagcaatggatttatcgatatcccgcagcgtatattgacaatactcctatgggaaactggagtaagtggtcgctgatttgtagcccactcagaaaataaaaaaagtgaaagccaggatcctcgtgtgaccatcccctcgatggagtggatctagctgaacgaagagactgggcgggtttaggagttaagcacgagtcaaggctgactggggggtattcttcccatcatgtcgtggatgggagcggagaaatgaccggcgccggtccatgcatattgcagaatttgattgtgaagctcggcggatcgctgagggtcgaaagtggactcggacatagaaggactagctcagggggaaagcaattgcagcgtatgttgtcaaagcgaaaacaaatccgagatttgggtggattgccttagcgtctttcggggtctgatctcgctcattctagaggataagtcagggctcaaaccccatgcgtgatgtaacaagtttgggtatggagttatatggcatggaataaattgcttcaggtagctgactgaatataaagcagaattatagtttagttgcattcagttgcatgtcttgggcagtacttaggagaccaaaggggaaggaggataatggccgaggtctgcggaggagtagacggtgtcggtttagaccgtattgaagggtctgtatccgctcttctacatatatatcgccaaaaagaaatttaaatgcccttgcacagctagtagtcttctcccagcgcatttgaaataataaaccagtccgttcttcaatagtcaaagaacggagtgaacagcaggataagagttgaaatgaggtgtgttgatgagtaattcggagcatccgacgctgacaaagctggcaaggaccaccaatcaccggttgcaaaccccgatttcggggtttcggtatccgtttttgtgtgggagccgcgtttgtcgcaggatttgttgcaaggtcgagagaaaggagggattgggtaatagttgcatgattcatgaggcgggattcgtgattcctgcagcattcatctcataccatacaatgttggaggctataatatctacaaggaccgatcatcgtggagttgcctaattggaaaatgggaacgtggaaccgaggattagactcggcaggctccgatggtcggccttcgatcgactcgtttcgataacattgtagaccagatttgcagagggtgtgggaaggaataatagggtaggatgagctggacgagaaaggcaatgtacaggtataagtagggaatattcacaagcgacacgagatccttagtatccgaatcgggaggcgaatgaaggcaaaacggaggcaaacccgagggattaatcatcatccacccctccggcccccgggcttccccccactgaagattcaaagaaaaaaacccacttgtggccccgacttctctctccttctctctctccggattccatcttacaacatcgccaaaatcacgattcccacgaatcgaacccaagtcacctcgcaacaggttcgacatcaatcgcatccgcgacaaatccgcaccgagccgcattcggcatttgagtcacgtctctcccgtccgcgcaacgcgcattttcaccgtccatcggcatcgagaaaatcggtttccggctcctgccttaattgatcctacgggtaaacgggaaagccttcataatggccaactacaatgggcgtcgcatgcccaacttctcgcaatacctcgatgacttgaacgcaattccatcgccgtatgaccaggcccagcagcagcaacagcagcagactaccttcaacgacgaggacctagctctgttcaccaacaccgagttcttcgagttcgacaagttcaccgacttcaacggtctgccttcgttctcggcagaagatgacaagacacacgaggctgtctccgatcaatctgcgcagaatgtggatctgaagttcttggatttcttgaatggtaagtgtggctgatttcggtttctgtttttcgcatcgctggttggttagtcctgagtctcagctgcatggctttcccctgatcacaccatactccgcggacttgttcacaattgtgtctattggaccaatgtctacaacatgcatattgtttcattggttgcctcatgaattcgtcattcatgcctattgcacgagtccatcgttttggggtcgttttggcatttatggcggttcatgcgcttcctaccctcaatatcatcccacatccttccacagctttgacctccttggctggatttttgaaccctgcatatcatccttcccgtggccctagcagggttttcttccactcaaatttgactttggtcgttggcgttaatgctctccgctattacgccattccacgtgatacaaacccctgctcagactctaactactgctcggacccccactactcttcgggaaatcgaaacccgcgatgtggatgttttgaaattgaatcaatgctaacggctttacagcagagggtctcaatggcattaccgatttccagcccgacctgactggctccaacgtccaggtgcccatgcacaatgcccacttccctgcggttccgtccgttcctagtgggcctgtggctgcgagccaggcacccctgcagcctgcgcctattcacaccgctccgaaggtcgctcaaactccatcctctgtttctatgtcgccttccactccggttaccggcaccaagcgcaagaactcagcacactcgagccaggagagtgctgaggaggctagtcgccaaatggccgaggaggataagcgccgtcgcaacaccgccgccagtgctcgcttccgtgtgaagaagaagcagcgtgaggctgctctcgagcagaccgtcaaagagaccaccgacaagaacgacattcttgaggcccgcgtgtctcagctcgagctggagaaccactggctccgtggtctgatcatggagaagaatggtgccgacgagcagtctgagcaagacatctcgaacatgttcaagaagttcttggcctcacagaaggccgatgaatcaagtatttccgacctgaagcgcggtgtgggcactaccgtatgaaccattgcctaatattaaaagaggaagaaaaaaaaccggcaaaaataaaaaaaaaaagaaaccccagtcttatttgattgccctgctactctactctgctgcttcaggtggtgaatgtcctgggcttttgcttgttagctccatctcaccatctttgccttcttgttcatagtgttctttttccagcgatgttgttttccttgtttctagcagccagagctacttcagattttatctgcaggcccagggggtggtgggtggatgagtgatgtctctcatgcagttacaagaattctagatgcaagttttcatgtctttcagctcggtttacgcctgtccgacttgcgtagattatccgttttaactaaacaccaaataacctttgcttcaatctacatacttaaatgtttccaccctcgaccggcctcgctcggcaatggtaccgactggccgctatacaccttcgtaaacggactgatccacccagcaagctccacaacacccggctctgcaaattcgacaaaaaggcgtggatcatctactcccatcccccgatatatccagaaatgctagaattcctgaaacgcaccctacgcaaatctcgcggaaacgtgtacggtctagaccatgcggtcctcaacatacagctcccacagcagagtatgtggatgaacatgggctactgggaagtgagtccactcaattaaataattgtctggtttgaatccacattgacccgcttactagtatacaaatgacttcccagaagcctgccaagcgcttctagaccaggtcctcacagctgcgctaacaacggagaaggcatctgccgtgagcatcgtggatgtcgggtgtgggtgtggtgatcagtcgttatacatggcgaagtttttcaattgctcttcttctacagcccagtccgatcctgaaactgggactaggacagcaacctctgccccaagctccagtacccagtcagacatccaagcatcagagtcaggcctgcggtctcgccatagcaagaccaagccgcaatccccctctcagccacgcctagattcctatatcgggatcacgctggaacccgcacaggccgcgctcggctcacgtcgtatccatgatctgcagcgaaagagtgaaagctctttccaggcagatatcttctgcgcagacgccgcagtacccagctcttggactggggatttgaagaaatcaatcacggcgcttgaggacgcgtccagtaaccaaaatgaaaatgacaatgataacacgtctacatggctcctggccctagacacattctatcacttccgcccctcgcgtctccctctcctaggctatgcacacgacaacctcaatgcctcgttcatggcttttgacttgatactatctgacagtataacctggtacgaaagtatcctcctccgattggtgtgctggggcacgaactcgccgtttgggaattttgtttgcgagaaggaatatgtggagctacttgttacggctgggtataatcctgcttctgttcagatccgggatatctcgcagcacacttttggggggttggcggatttcattaagcgcagggctgaggaggcgaggccgtttgggatcaagctggggaagttccgtgcggcgagttttgtttttgcgtggtgggctaagaggagggttgttaggggtgttgttgttgttgcgaggaggtaatgaggggttggatggtgggtatgttgtcttgtgtagcagtattgtgagccgctatcgagaggagggtgttcggtattcatctaggcagcctttacttcaaaagtgtatgcctatcgatctacaaggcaagctaagttgtacatatcatgaaaaccaaacaatatcaatggctctgatatctacaagcttatatgttacataacctatattacagtaatactagggacctcgaccgtctaaggccttcagatagttgttgcagagcgaagcgactgattccaactcctaatgctacgcaaagcccccctcttactggcttattctccccctgcctataatttcagtaccgccttcacaattaggcatatttcctgccatgtggtagtagtaagacagtaggtacctacaacttatatataaaccactgataaaattaagtcccctttgtgatatcattattaactgcttgatcaactgctttatcgtcaactacttaagtgaccactttagcaaccgcttgaaaaaatgcttgagaaactgctttagtaactaatctatgaaaagacatgcacacaaggttatttaattgcttcgcttcgctccgcaatcatgtgactttccaatcctttttctcccaaataggcttaggccaggtactctaattcccttttccccacatagaacggggcccgtagtatgtatacaccttcccgaatgaactcattgttgattctcatcagattttcttagtctattgtctggtacaagctttgactattgaaccccggaaacatggatctgtccgagagatatccaccaagtatgctattggctgaagtcgccaagaagctgcacgatcatcacagtgaacttcgcgtctcccttacctccaatcacccgctgtgcgtagaagctctcgctgcaagtctggattgtgtgtatggcattccggaacgcattttctaccaaccacgaatccacaccgacgtgcagctttacgacaaagtgccctcgaaaatatcagtttggagaacaacccccccacagcattaagccgacgtattcgaaccacgggcaggctcgaatacgcaggttttccagagccgctctctcgcgaacaccatgccgcgttgaagaagaaggccgaaaacatgcctccaccgcgagcttctgttctcgaaatccgcgctttgcgcacagagaatacgcccgtatctattgtcgagaactcaacaatcagtgctgtcgattgggatgtgggtatgccgcaatgccacctcgatggagttgaaatgatctgggacactggtgctaccgccactatcatcacgaagatatctgaagtcaagatttccaagcccatctgtcagattcaatccatatgccgtacaccaattcgagcggcactcgcgtccagctttccttcgccgtcgagtttaccaacacgctttttacaatgaccgtgatcgcatgggtcgtggataaagaagcaatcccaaatttccggtcaggcatgatcctgggacaaagggattgcatcgatgccatccagtatagatctatcccgcgatcaattcttgaggccagaggggagtcggttgatgaaaagttctggggggatctcattctagagagctatgttgattttgacggaagcttaaaggagatcgtttagctttgcttgtcctgtattctgattttcctgccctgacgtcgctttctttatcaaagacaccgagagattttcatgtattattagccttcaagacatcgacctcgggtaaggaagacacttcgggagtttcatgtattattaaccttcaagatccatggatttataactatgggctgagtgtgctttctatctcccttttctgtatgttagaaaagctcatatgctggggaggagactcgttgtgcccattctctctggaaaggtcttgctaggtccggtataaaagtctgctttaatgctacaatatctcaagtatacttctataagcggtatagtttcgtgatcggcgtcccttgtgttgttatcactcatcctagtatcccgagtatcatacaatggctccattgtatcgctgttcaggcaaacgcctcccagcaagttgttagccctgctgaacacgcaaaattagcgagcgcagtacatgccacgttacaaaccgaattaagagccttcagcacactgcctagaggctaagctcgcagtctcgagtgtcaggtgaagtataaacggtacaccgatggattaggcagcttcgacgctttctacgccgtagttactctagagtctgttctccccagcagagttcttgtctaagtatgataagaatgagtaagtatgtcaaaagtctcctggatcgatcattgcgcatattcgcctcgctctctatccgcagtgctttctgcggcaaggccgtgcctattctttgacagattgtgtatgtttgaaaataaagctattcatatagtataaaactgtagcttgccccattctagatattcccactatatttatctaagtctaggtggtttgaagatgttccgaccgtacaagtctgtatgtttcttaacattgaaggcactcctaccatataaatctgtattcggatttgtatgttttttgatattgagctattcacaatgaaccgtgctcactagcgcattcaacaaattgcacccaggagccccacaggaccccctagtcttcctacgttgtacaccagcagcttgtagaatattccaagcgccagtgatgtggagacctaacgacactacatggcgcgctgatgtatctaaatgatacttcggatgaagttcttggcaggcaagcaatctccagaatcttctattcaattctcaggggaagttcaatttagtgaaaagaagttagccaaagaatgttgggtaccatcgggcgcaattgtcagtcctggcgttatgactcttatgagctctaggtttcagaaaatcgcttgttgcgtaatgacttgtatgaccctgctcttgaaaggggaaaattcctcgggtttggacgttgtggaaggttatatacaacaaagaagacgattctaaatgaattcagcaagaatggccgctccaatatcatcaacaactctcctaatcgctttcttttcagtctatatttctatattatagggacctcgggagtgggaagtggatattttatagtactagcttgtgggtttgtgggtcgccatagatgcccaacctccactcctgccctggaggatacagtttacaccaagggtatgtgctgcttttgggtgaagaaacttcgctctactatccgaggcctagtccggactctatactagattataaggtctttctaggccaaagcacatgcaagccacccgagcccgtggcggcctgactcatgatgacgtaaagaggcggtgactggcaccacctgatatctgggcacatgactcaagggggattcatttctgagaaggaatgttgtatacttgctcattcttattggcagtcaatctaaattataatccagctcactgtatcgtctttgttcattgctaattgctaattgctgagtagtctgactggccttccaagaatgctcaatatgtttcaggcaactagttcggcagttatccaaggctgaagccgctaagtggtgggtctagacgatcacatttgctttcggcgctcctttcttttggtttttttttttcgggcttgtttttataaacaaatcgcccgcgcttgatggcgaaaaaagcttttcccctatatattccaggcacctgatacttttctggtctgacagtcccaacagggaaaaagatactgcagccaagaagatctacaagatcgtccagattatacccgtgaagcggtcacccttggcaatatggatgatcagctgcctgtgattgaatcgcatctatcaagcgaaaagccacggacctcggctgagatagagagacggatcacatcaaactctatcggatcgtcgactggctcaagcagctcctttgaatatgacccacagattcataggctgcaatcgcggaatacagagctggacttggaacgccatcgcactggcacgtcgcgagcattgagcaggactgagacgcaacgcgctcaacatgcgctcactgtgggcgagagtcttcgatcgcgaccatcacggactccattgccagctttcggtggaggcaagccctaccctccacctctccctgaacgggaggattacgttgtggagtttgatgggccagatgacccattatacccactgaactggtctgtgaaaaagaagtgagtttcaccatgtctataccgtactgcgtatctagcgtgcagcgttcttactaacttttgcaatccagatgttacatcagtgccatgctcgccttcaccagtatttgttccaccttcgattccgccgtttttagtgcttcatcgagtaatgtttcaaaacacttcggcgtcagtctcgaagtcgccatcctctccagctctctatacatcgtcggctacgcctcaggtcccttggtatgggctcccctatccgaactccagggccgtcgaatccccattctcatcgccatgttcggatttggcgtgttcaatatcggagtggcagtcgccaaagatttgcagacactcatgatctgccggttcttctgtggtatgttcggcagttgtcccttggcagtcgtggctgctgtattctctgatatctgggacaaccgcacccgtggtgttgccattgccatattctcctcaacggtgttcctgggccctctcgtggcacctttcatcggaggcttcattaacatgtcatatctcggctggcgctggaccgcctatatccccgcgattatgggcttttccgctttcatcatgaatcttttcttcctgagggagtcatacccacctgttgtgcttgtggctaaggccgcggagctacgtcgtcggactaagaactggggaattcatgcaaagcaagaggagatcgaggtcgatcttcgcgacctgatcgtgaacaacttctctcgcccgcttcgactgctgattaacgaacccttgatcctagcggtcactgtctacctgagttttatctacggattgctctactgcttcttgaccgcctatactctggtcttccagggtgtttacgggatgaacgccggtgttggaggtctcccactcttcggcatggtggtgggcctgttcaccgccgcggcgtacatcataatctcgagcaaggcctacaataagaaactcgaaatgaacggtggtgtccccattcccgagtggcgtctcccgcctgtaatactcggcggtggtctcttcgctgctgggctcttctggtttgggtgggctggctttagtggtaacgtccactggatcgtacccaccttgagtggcctgtttactggatttggccttctggtcatcttcatccaattgttcaactatctgattgacacatatctcatgttgtacgtcatattccccattcctctaacttgccatgggtttatctaacatactatctacagtgccgcatcagccatcgcagcaaacacattctgccgctcaatggtggcagccagcttcccgctcttctcacgccaaatgttccatggcatgggtatccagtgggccgctacgcttctcggatgtgtcgcagccgtccttgttccgattcctattggattctacttcttcggaaagagactcaggatgaagagcaagttcgcaccattttatgaagctgtccaggagggacacgcagctgaggaggccgacgagcaggcggaggagacggtgcaccagcactgaacatataattgtcttgttttttgtacacgatcatattcccactagggaaatgtaattattaaaagtcatattttagcggctatgtttttgcatgtctcaacgaagcgatcttgattcaaacatcttcacaccattcttatacttgtactaatatgatgttgtatatcgggctcttctgtcggtctgatgatcatcagatcattgctgtggcaacagggataaattcaatctaaacattttacacctttttcatagccttttctggctgaagagaatatatcactttggtccccactggatattgggttgtatgatgaaaaataggatgagaatgaatgtatgaacgcaatctggatattcataggaactctcattgacctaacttagtccagaagcaagagtatgctaaccaggaaataatctggtgcttaataaaactgccatttacgacaacgtgcagagtcgaacggagatgaacacgtgactttatacgtagtatgtgtagtatatacaaacggagtagtagaataattatacaaagagggtgcactctatctcatcaattgagctggtgtaaaagaaaaaaaaaatgggttacttctctttgattgagcgtgtcatccttagtgcaggggccatgctaatcttctctgtatattttcatttgaccatatgccccgaannnnnnnnnnnnnnnnnnnnnnnnnnnnnnnnnnnnnnnnnnnnnnnnnnnnnnnnnnnnnnnnnnnnnnnnnnnnnnnnnnnnnnnnnnnnnnnnnnnnnnnnnnnnnnnnnnnnnnnnnnnnnnnnnnnnnnnnnnggtagcttctctttgattgagcgtgtcatccttagtgcaggggccatgctaatcttctctgtatattttcttttcaccgtatgccccgaagggcgaaaggacatccttatagttcaatataaccccacttttctgcgtagagataccgccttcttgattaggtgaatggtattgaagtggcagaaccagaccgcctaggaggtttgtgccactatatttgtgccttccagtcccccccaccgccttcgggttgggggtgcaccacaccgtaaacccaattcacaccgtaagcccaattttgaagccattcatattaattactatctttcaccctaagtatctacccaaaaagattcccctccctgttgcgaagctaccatactatgtgataatgtagaattctccctactaggcgacttgggtggcggtcagccgtacaatcttgtccactgtttatccaacttcttcctctcttgtaaagcttctttctctctcctggtcttaattgatcgattggcatcttttgtactgagtataccagagtctgcgatctcaggaatctctctcttagtgatttttcgtttccgaggggcctgtgtctcccttatacaactgacggtatcgcttattatcgtaagcccttcgctatatgtttataatagtagaacgcacattataggcctcgttagagcttcggtataaaggtatctataccgaatagcttcgaaagctctttttgattcttctctaggttttaggtactctttagaggggtactttctatactagaagaagagatatatagaggaagactgtagcctatataagatcaccgagaaggtaggatattcctatcgccttaaactccccgaatcgatcaaggtatacctaatattctatctaagcaaactctaaagagcagcaatcactaaaccattacttagacaataccccgacctactgttgcgtgccagattccttttaacaaaagaagtgcatttctaatcgaatatcaagtatggaaaaggaaaagaaaagaaacaaacgtgaaaataacaaatgggcttttatacccctttagggacaaagccctattctcgtttcccctagaaggaaggtacgactgcctgcgcaaacgaccaacagtataatcctaaacgggaaagtacgagtcctataagtgctaattgtaatataacccctaggtaagaatacatttagtccctaaatactagcttctcgttatccacatggttgtctaatatccgattatcttacgcggcctcaatctattcttataggcgtatcggcggcctaggcttcgctagataggtattatagaattccttaatcatctccggagcattcttaaagttacctactaggtactatacgggatctaggttatatcctaaccactatatacagtactgcagcttcctataatactttcttatatctaggatctttttaacttcctacttattagtctaccctacctatattagaggtagtagatctatatattatcttataagtagttctatacttactaccttttatagcttacttaatttaaatattaggtagatattaattaactatagtaggtctaatttatatatattcctaacctttttaataatcttataaggtctactagtagtataggagagtttttaacttagatagtcctatagctaatcctttatagtaataaaaactaggttactaatactaaagtcctctttataacgataacggttagcctattatacctatagttcctatgactttataatctatttatatatatcttcctagatctattataactttaagagtcgatctaccgcttcttatttattatatattagtcttatatagttctaattaaaagatattgctggtttataaccctatttaacaaagaaaggggacctctttattatatcctacggaagaattaatactataaaatctactattagtaggtattctaactagttatcctagttatatttaatatatagtcttaattactatactataaactaatttataatttcgctctagctatctatttataggtggtatatagtagatagtttctacttaatccctaggattttatagaactctatctaaaacttagagataaactatcccctttagtctaatataatagtttcggggattcctataatctatataatattatctataaatagatacactatctactttatattagtatctttataatagggaattaatatcggtctcttacttagttaattaataataataaatactatatcccagacgggaaagtacgagtcccgcaagtgccaatcgtgacacctactaccactactcaggattagtaaaactaacgagtaggaagtcgataagattcttatcgctaggatatactatcaaaaactacaataccgcgttcagtggctaggacacgacctagacttacaatagttttctgtaagtaacttcaagaatactcccaagaagatcaagccttccataaccaatacctacagaagcctagactaccgatacaattataagaatagaccaataatataaataaagatagattcttagacgaccacgttaacgatgataaacccacatttagggactaaatgcattcttagccgggagttatataacgatctaggaaggatcgtacttgccaaacggagcaggaacgactatgcccctataccttcccaagtagtttctcttttttcctttcttcttcgtacttagaatttggtctgaattgcactcttttctcctgaatcgaattggctcgtaacactggattttggtccttatatatgtgcataaggtcaaaaccatcagacagcgtcatatcggacgcttgccggaatgcagccttaagggtatcatccgataaagttgatgcgagccactcaccatattctttaacggctaagtctccgaacccgggaatcttcaatggacctatctccttcgagccgctttggttagcggctgcattggaagccgtcacatccaatccaggtaggtgagactagagagcaataatattgataggtagatacagcgaaccgtctctaggaatataactggtctttcggttggttttctctgtcgctactactcttagatataaagcttgtctcagattgcattggggacatctttatacatctctagaagaccgcctttctcggcgtaggtatccaatcgcttaagggtttgcgtacacaatggataatgcttttttaccactggatccacctagtagtaagggccgaggtagtatatagctaaatcacattttatcatatcatagacgtaacgccaaactacttgctgtctacttatatgttcttcggtatctagttatacgtctcgattatcgagtattctccttatcacagataattttcctcttctcccctttctacccagcggacagagaaatgtgatcttctatatagctaaaatatatctttataagtcttttgccacaggagaagcgactagaccacgtctagagttgtttctcgattggtatccagactatatcagttttattaaaacgtttagttagatcacgctgagaacgactattgaccgatacaataatcgccgtattatcgaccctgatcctcttattataagaaactttctcccgaagggctttctatagcttctcttccagcactaaacgtcagtatatgctcggggctaatactaggtcttcttcggtgtccttcaccacagccttattgttcagcgtgacccgcaattctatgaagtagtgaatacagcttagcgggtccttgtcatagatcttatctttctcctactcagattcctaaagaaatggtaaggtattcggtcgagatcggcatgcgagattgagctcatcgtcgagaaggatagataggaagggactacaagcggatcttgtagcataagggcttcggaagtatcccggagtaggagcatacaatgaaagcgtactggcccagctccgtaccggcatggcaagactcaatggatatctctttcgaatcaatgccgtcgagacaggtcaatatacatgtggacaagcgagagagaccgtagaccaatttctatttctatttcgatgttggaagtagaccgcccaccggaaggaaatgctgcaatgcacccacactcaccgaagtaatacgtccttcttcttaggagggaagccaccctccgatgatcaaaagtggaaaccgaatttggaagcagtgcgagcctcaatacgatttgcgattgctacggccgacttgaggccacttaacctagccaacgaatgcggttagaatacccccccacctactagccctaaaaccatgtgacaaacggtagacgcgcttcaactgccgaggataggatgttgaacacttgaagaagcgccttcaagccactctactaagtaatactaacccatagggtccaactatgagaagtcaatgccgaaggaaatactgtatgggctccaatgagacacggcgcatgcctaaacatgcatgtactggtagattagtgatagttgcctttcggcccagccgtcgggcattaatgaattgtgtgtgtgtgtgtgtgtgtgtacataatgggaacgttgtaacgcaccccagttcagaaatttgacaaaaccgttagagatgatgtccttaatgtatgtcttttgaccaccgcccttgcacccatcccacagaaagatacacgctcaggaggtacatcctggtaaacagctttaaatggcgtgattcaagttttttttttttttcaagcttattaggggtactcccatgattcaatggaagatgagacatacaagaaccgtttgatcctagcttgaagagtccttcaatgatatctcgtcgattgtcatttagacttgctttgctgtagaaaagcagtgcatcgcgataaagttcaggggagccttgcgcatatccttgagcgtcttccataatcatgtcgtaaacactagtttcgtgtaatacatatggtctatcgccattgtcgcgtagatctgtgtatataccgtctttggctcgtccatctatatggtatcgcgcgtagattgcatctccatagcgcttctcagaaatcgctatgcagtagcgagatgcccatggttcgaccattcgtattctcgccgttttattcatgacgtctgcgacgggaagatcgagaaacagctgttcaggtagggaagattccatgtttgcaatatcgtactttatagtcgctggtaggctttggaaaatagattcttgcgtcaaaatttcgctgtgtagcagacagtgcaagtatttgggggaataagtctaatgctacaggctcagccgagctatttgcgtggatgccgaaggattgtctgctaagtggggtcattacgtggatttacacgtgcgagagcactggagagatccataccagttggaataccttcaataactatcactactaatgcacggggaatcaaaagcggcgccaccttcatcctactcaccctggcgacacccaccgaactattggccgagcttgagccgtgagttagttgggtggatgaccaccagcaaatctccactgttgtatgtttttgtttttgttttatttagcttaagaatttaattcccacatagtatgtctatcattgcactgctaaaggacgttggccatgcgtcttgtatctatgagactttcgacatatgttgtagaatagactagagatgaataagctcatattttgacaatactgttggcttacagagctagttctgaatctaacagaacttgctcggactatttaccggtaacacgaagctttgagagccgtgctcggtgttttaacacatgtcaaacgacactcccctacataatgcaactgtgacatttaacgaagatcaggtaacaatatatctgacttattccaaccattatggcctgaacatatccgttgagaatgggcatcaaatacataaacataatgtgttttatgtaagaatagaatccattaattaacactgatctacgacccatagcccgggttctcagttttgtgagcatagagaagaagtcacgaagactatactttcgaattaagtaacacacgcagcaaaagacggccgtctcagtcccacataccatgtcgatttcgcgatataaggcctatcaattttgtatccttctctctcatctatgttgtcgactgtcacttcatgtggctctgtacacatgctcgcctttcttcttttaggttagaaccccttgagctctgcgcgcggcacatatatattaagttctgaccctctatcaggggttctcggctctttctacgatcatgtcaaggccgggacccagcccgcctgctgctctggtgtatgcacagatctcgataacgatgtcgccagctgtcatgcatgtaacataactgtgagtgaattcctattttaactagagtatataacattggaagtcgaccttctgacacaaatcttacttgatagtgcactagcgaagcaccaacctgctgctccgcaacctgcaccaacacagccattgacccggacacctgcggcctatgcggtagcaaatgcacaggcaccaaccccgcctgctgtaacgggatatgtacggatcttagcacagatcccgcccactgtggaccatgcttagcaagctcgtgtactggtgttaatccagcttgctgttcggggacatgtgtcgatcttaattccgacactaatcactgcagctcatgttcggctttgccgtgtggtggagcacagcctggctgttgctttgggcagtgtacagacctatttaccagtttgcagcattgtggatcttgcactgctgcgccatgtcctggcttgctaccggcttgctgtgatggagcgtgtactgatttaacgactgatgcgaaacattgcggatcgtgcagtacagctgtatgtgctccccccccttcattggatgggcatactaactggtgtttcctttgatagtgcaatctagggccgggaggtggaggctgcgttggaggtaattgtattagttgtcctacgaaccagcctttctgtcaatcgtcgaacacatgtgtaagtttccaactatgccattgtagaactctgaactaattccaaaaatcagtgcccgggtggcttcacgtgtatcaataatggtcctctgcctggatgctgtgggccattgaatgtctgtccgccattatcgaattatctcggtgattccatatgtgtgagtgatgcactagactccactgatagactttctgaccagggtaagatagtgtccgttgccatgtactcttatcatcgcgcaactggtttgtataggattctaaggtgaaccttgtggtcaattcgaggtggaaagagacggcgagaaaagcggatctgaataaatggcctgcaaaccacagactgtagcagattagtatagcttggcaaaagttggatgttcgagatgagtttattcatattgtacatgctatgtatgatgcgctgcaggtatattaacatttatgaatgcccgaaatgaatatgcaaaaaaagtctcgttacgttcttgaccggtcgttataaagaagagtctttcatccagggcacctcgacatcaagggcgtttgcgacccttgtcgcggaagcgagacatccctcaagcagtaccatcccgtcccagcaccaaccaccaacgagccagacatttccatctccattccgccaaaattggctcttgtcatccccaaacttcttctggctgaaaatctcattgatgatttgtctgctggtggacgatcgcaagacacgagtgaatgtggcagtgtaaaagaccttatcggggtcaatcggagaaatgggataagtcgtaataagagcggctgacggatgttcatggatcgtctccgtcgctgtagcatttgagcacatgtggagtgggtgaggtggtgattcgccgcgattcaaggaaacttgcgaccagagggatttgctagaatcaccaatcccggaaaagtcacggtgcacaacggattgaacggtcgtagtggggacggccttcattgcgcttcggagaggctggaaaatcgcgccaaccacatcaggcgtcacagccagaatgacatggtcaaatagccgtgagctgctctggccatcctgggtatttgtccagctcacttgaacttttgtgccgatgttctcgactgccgtaaccttcgcgccaagtttatacgtcaagtcttcggacagcttctgctcgacatgctggactccaccaagaacagtgtagtggttcttacggaacgttcgtctcccataaccgaccagatcaagagccgggaaatccattaactcgtcgtgtgagcaagtcgcaacgctcgcgaagaccggcaggaagtagtgcttcacgtagtaactgggcaacataatcctatccaaatattgacgcagagactcctccgtgccagacgactccagagtcttgggcgctacaaagaaacagcagactttgaaccaataatagcatattgccaggtagcaaatctcgagcagccacccggtccatgataagccctccgggcgcaggggaggtatttggtggttatttgaggaatgcatgaagtatggggaggtttgtttcgtggggttgttcggtagtgtcgacagggagtaaataaaccgtagcgagccgtatgggataccgaaataatcatacattcgcttgagactttcgtagtatccgtcggcgaatgtgcgcatgggaagatcgaggcgttgggtctttgcgcttccgccattttgggttgtgagattgtatgatgcggaatcgagcgaaagtttctcttgctgtgttttttgttgggattaactttagttcgcgcgagcgacgtcacggatgcgaaagtttgtaccttttcgaaaacttccacgtcgaatctcccttgaggatcgctcctgagcatgtatgcgaccactaacccggccattcccgtgccaactacggcaacatttttgtgtggttccttcgcctgcatggttcggaaggaaaggttggttcacagttccaagatatagagagcgtatacgtgcattcccgggattgagagagaagtcgaaggttaagggttcaagaattcgattgaaacaataattgaccatccacatgtggctttcaacatttcaacctttccctaggaggttagttaatcatgccccacattgtgtcagcaagggcctcggtataattccttgtgcattcatatccgtccaataatgcagaatatatatatcagcatatgataggccaatgccgagtacattgttcccctttcagttagtgcgaccttgaaaccactattgggttggttggttgggagtcacaaggacatgaatggcgccacgggtgataaattggcgccaagcctcggtgtttggtatgtgggaaaaggagtggctatgaaacaacttatgctgtactacagctatgttgtgtaatctcgtcgtgaagtttgtacaacgtatgttgtaggaatcaaattcttacttctatgtcgtgtgggcacctgcaggttccatacctggatgacataatcagatggctcccaatctttatcgcttatcgtcacgtgcgtgtttgttgacgcgtgattttggattttggactcgagaacttggataggcagggaaacagatcaagatatggattgagaggcatgcacctgccgttgatataaggtgttctggaacatccccaggaattgtgccactatcttgtcaactactgccatggcgcgccctaaaacagttcnnnnnnnnnnnnnnnnnnnnnnnnnnnnnnnnnnnnnnnnnnnnnnnnnnnnnnnnnnnnnnnnnnnnnnnnnnnnnnnnnnnnnnnnnnnnnnnnnnnnnnnnnnnnnnnnnnnnnnnnnnnnnnnnnnnnnnnnnnnnnnnnnnnnnnnnnnnnnnnnnnnnnnnnnnnnnnnnnnnnnnnnnnnnnnnnnnnnnnnnnnnnnnnnnnnnnnnnnnnnnnnnnnnnnnnnnnnnnnnnnnnnnnncggcgccccgacaacagccagtcttccaaataacctccgcattccctcatcgaccccgtccctcacaaaatccctgggaaagctatccagacaagcactactagatctggcatttatatggcttgacgatcgcaacatcgcctcatttccaccatacctacagactgacgaaaaagatggccccgacgatgacgaagccctcccctaccccgcggaggagacaatcgaacaagtccgccaagtatatgaagatcttcaggaccgaaagggcgcaaagcgcgaagtgctcgaacgaattctggaaggcgattggcggcatggaatcacactacgccagctggccatggcagacctccgctatatggacgatcaccccgccagccttcgatggaccgcactcgagctcagtcgcattgatacaaagcgcaaggtctccaagaaactaccgccaactgactggtccagttctgtaccgcgcatgcaaggggcaacatttgtgcaaggcctccagcgagaaatctccccattggtcaaggctcactatcacctcgcccactcggcaacattgccgctgacattcttacgtatctttgtccttgactcgccatatcaatctcctaggcaggcagccgacgtctttactgattcgtcccgagtcatctatgtcgctttcccggatagttgcccctacgtctacacttctatagcagcatccaccggatcaaagtctgctccttcgacaagctcggtggctactgatactcgaactctccagcgcctggtgcgtgattccattcccaaagctctatctcgtccgcaggaacgattctctctgcaagcgacatcactggcagcaaagaatctgcccacactcttagcccttcgcggaccgggacgatcaacggcgtcaaatggcgcctttagcatatttgcagacgcagctattgaaggaagtcctttggaccctcgaccctccaatacagtctcacctgaagagcatatccgagcgggtcattctagtctagcagaaggcaaagaaaataccgatggcttatcgaccaaacgaagatccagcggtgttgatacaggtcccctctctccggattcgaagaaacgtcgtctggccatcgattcccgattcggaacattggggtcatcactcgcccaggcaccgctggaccgtcttgatatccggctgcttgacaaaccaggctccagtgaacagcaggatgatgatattgacgactctacgtccacgcccgccgtgtcactcactttctccggctccgacgtcatcgccgggattcgcaaacttgctgagctaggcatcgttaaccctgagcgtatgccgtcgtggatgactggagaggaaggtgttagtgttgcgactgttcgactaggccaacgacttcaaaagggtatataaatgatttttttttggtgtttggattttggggagttgagaagcttggtccttctttgtttcttcggccattagggcttgatgtgatacccggacttcatatgaatgatcattttgttgcttttttatcacgtagaagacgtcctaaccgagtatagtagcgagtgaatgtagtctacacttcacatgcaaaattgtaaacatggcattcaattcatgtatccagcattaaaaagtccacctccttccagaaccttggggcacatttgcaaattcacaagataagtattcctccgatcgtataattataattgctcgccatcagagatcattggatatccgacatagctaatgtgactagtctgccattgtcctcaacgtggatatcgcaatcctttaatatgatatagtaattatctatatccacttcgacatcaccaattaggtattgctgatcgagagtcgatactggcgtcacaaccaagaccgatatacttcccggcgtcgtatttgcggtcctttgacgcatcagcgcgtatggccataagggcatcagtcgcagcattgcccttggcatcatgcgtatcgacaatagaccatgagctgctcagtaaatcccgtgacgtcatcttcctcccgattgttagccatatactccgtatattgtactcggccattatagccatggatccagcctcctcatcagtgacagccgagctttctccgacactggcagatcctggtgcctaaatagttaacctatgcaccaaatagtaatacgtagaaagtctcgaggtcgtgggtggacacacctatttgggaaagagcggctgtttgcactgtttgtttggggaagcttccctatcgctatcagctcgtggagaagaagtggactgtcttcatcaacaagatgaggctatactgcaacgcctgccattgcagttaattctttacccctttacttcttcgccctagagctgatatctgaacttattctctatgtcacgtccacgggctctgtcgggcgctgatgccccaaaggagccacatggggtctccctcaaaggtatgtaaatacaactcgaccgatagttggaccagcaagctaattatgaattgatcagtgttacggtacgttaaatcatccatattcgttgtgtcgatgccagcctctaactcttaatacgcagccttgcgcggccgtcgctttcctatcagcatcccctcccgacgtctaactctataatctccacgaaagcctcactaagctatccgtccggtgactccgatgatcaatttattttagcgcctcttgtgagacggtgaccaagcgccccaaggaaaccgtttactaacggcaatagcttactctacctccctccttcggatccgtctacgtcggagagacgttcggatgcacacttagcgcgaataatgagattcacgatgacgacaacgagagactcctcacatccgtgcgcatagtagcggaaatgcaaacaccttcgtcagtggcggcactggagctggagccgcccaacgactccgcatcaacagacggtctgaagataggcgagtcattacaaaagattgtacggtttgacttgaaggaagaaggaaatcacatactggctgtcagtgtcagctacacagagacgaagatgggctccgactcgcaagcagctagtggccgggtcaggaccttccgaaagttataccagtttgtggcacagccctgtttgagcgttcggaccaaggcgtccgaacttccgccgctcgagataaataataaatcactcggtccgtacgggaaaacgaggttgctccggtttgccctggaggcacaattggaaaacgtgggcgagggcgcggtgatagtcaaggtatgaattccccattaatcctctgcgaatgactgggttttccacgccgaaacgcggctgtacctgaaaatccggctgggccggaatgcaatgctcaacaatttggctaacgttgggggatggacagcaaacgaaactaaatcccaagccacctttccaatcaaaatcgttgaattggaacacaatgagcccagacatgtcaccctcgtctctgcctacactcaatccacgggatgttctacaggtagcatttttggtggaacaggaagagggccagaccgagggacttgaaatcctccagaaggacatgcgacgggacggtcgtgccacgctgggtcagttgtcgattgaatggcgcggcgctatgggggacaaggggttcctgacgacgggaaacctgatgagccggaaacgcacttgaaacgcggtgtgcaaccaacccatcggattatttccgccactccgccctgcatcatgatatggacgccgattgcattatgtagtgcatccagccgctggattgcatgagggcgcagcaagggcggtttgttcatatttccaatggcccacttatataatattacctttgcattggaagcagttgaaatgtcctgaattgggtgtacagtgtaatatgtcggccgtttaatataccatacaatctatgtaggcctcaccgagcaatgcctgaggctctgggatagagccgatgcgttgccgagctctctggcgccactagcacggagcggaaaccagccttgccatgcagccgacgcttaatctttgtcacacagcagccgcctttcggcaagggagctccggtgctagacactcgtctaatttggccgcccatttgctactccttgtagggcttcacaaaaaaaaaaacgggcattcgtcctcggcccaaggccacgtattctacgggatgccacatatagaaacagtacttcgggtatgtatacatacacatgtaaggtcttttagagtccagatttatcgatatggagtaggggaatggaagcatctagactctggctgatcaatggggttcagttgtttacataggcctatgttgttgcccgatctcaaagatcattatctgcaatctactccgtatgtctcgcacagacttccacgggttctattttggttttactcacgggcttttacctataaatgattttcgtcatttttttaggttgtcaatactaccttgatctgctccaccgcctcttccaacattgagtcgtattgctggctgcattaagtgcatacaaggcttgatgtacgctgacaggagtcggagtgaataaccttgcccgaaacactgggatgcaaccagttgaaaagggctatcggctgggggagcccatgtgtcacgtaacgcgggtatgggccgtgttcagggacttacaacataaatagatatgtatttcggtacactatactccgtatggattaggtctattggacttgactatggacttagtgtttgcttatattgtacttgtccacagatggtacttggatatctaattatgagagatatacatagtaatagagatgcttggcagacccaggggaatactgacaccggaacgaactgcgattaacccacatactatccatatttttatcaattggatactgtggaaactgatatacatacaacatcttccgcacttaagcgatactttctttcacccctcgatgctccacagtgtccaactgtagtattgatcatctccccgggacaagccactccacttgatgactcctgactcgaaatcctatgtcccaaagtacacatcgtgtcatgcatagaaagtacggaataagagaaacggtgggaaacgtactccgtacatgatactagttgtaggtgtggcaaaaaaataaaaataaagaagccgttgggtggactccgcaatctaaaagcacgagggaataaacggtaaagtgaaaacctacaatctcccaagaccgcggcagttcccgatggttttcaccccctgaaagtgctagttagcagtttataaaagttagatatacaaaagaatgacattgtggcgctataccaagcaaaaaacccctaaaacccctaaaaagaaagacatgttgacgccatgtttcaatagagaataaaccccagttaccccccatagatagcgtactagttagttgacgaacctggttaaaaaaaggatcagccaagacccgcttgcgttatccgctaaagctcaaccatggatcacgggcctctaacccctggggcggatgcaatatttccaaggttcgtggttctttatatcttgtaattggaagttgcctggtatctatacacaacggtaggtatcattcgggaaagaagtggaggagtaccgagggcatacatcgctgttgatatagacataagaatgaaccggtattctgggtataccccggaagtctggatcccctttagagtctagccaccctgcacatgcctgcaggtcgttacggtgtcaagactcttgtgcatggaggctagggctgtgaatggcccgggcccttgatgggcttgatttgttaaatatctggacttgacacgggtgactcttaccatttttatacagtggagtagagatgtgcatttcgaaagtcgggttctagtaacattactacacgcctacgcaaccacccgtgatcctagggggaagaagaaaagaaagtttttttttttaaaaaaaaacaacaacaacacaggaatattccaaaaggtagaaaatatatgtatttaggtagaaataatacctggaggccacaaataaaaaaaaagctaatcagaatcgaactcctttttaatacaacgttggaccttcaaaccaccccgaaattgatcttcgctctgaactgcccctccctcccgttctcccccatttttaccagcttccccctcccgaacactacatgcgctcaattcccctgcgcattcctttccctggaaatactacgatccatgtggtgacaattaaggtattaacccgctacagtccgtcgcgactctctccacaatgccaccgcctccaagcaccccggaaggcgcccccctcgccgactacttctggatagccggtgtcgatggtgcagagatcctggacacttttcagagattgggagaagattaccgtgccaatggcaccgcatcaccaggccctgcgctcgcagacaccattcaggaggacgccgatgcggaggaggaacacaacccggatgggtttacccgaccaaactcgacgctcttcaccggtgtcagtcacaggggctcttctcaacgactatcaacactttcgaagaactcagagggagcaaatggggctggcagtaacagtaaccgaagcagcatgaccgtcaagggtggctcgtcgcccctgcgtgccccaaatctgttctctgaggacttcgatttcgactccgcgctgtacaagttcgccaacgagcgggaatcttttctaaccgacttgagcttgagcgctggcgctattaccccgaatacccgcccgcgatccagggttcgcacgcagaagatcgtctccgaggattcgccctcggctggcggtaacttgctgaggtcgggtattgggagcgtgcgacgatcctttcgtgatatgaatagtatgaagcggcagccgtcgattgctcgtcagggtgagagccctccttcaaccctatttcctgttcactctaaaacggggtcgtggccgggactttctgtggatacactagctaacaatggatcgtcttcagcttcggtgcgaacttctcggcgacttagcaactacaactcggtaattcctgtcccgcaacccctcgagatatcccccacaatgcacccgttgaaacgacgattcgagcccgttctcctcgaccgataccctacacgcggcatgccggacgagatgaagctgcgcggcaatttccccgactacgttcctatgttcgcctttccgaatgatgtcaatatcgtctcctccgatcagcgaccgcgctctacctggcacggattcgccatgacaacagacaatggctccaggctgcacgccatctgtgtgcttgtctggatacccctcaacccaaatgctgcagaggagctcgagaagcgctgcgaagaatggcgaagggacaacatgacagacgaagagcgtgagctggctgcgagcttaggtgaacggttggcatcagagcgggccaaattatcccggctcctagctcagctgccgactgtccagtcagggtcagaatcccgcgaacagctcgaagatgatatcagcgctgtggaggagaaaattgggctaatgaccgatcttcttcgtccggtccggcacggcgcagcttctaagatcgagggtctgaccgatggtgatactgggttctggattccccgtgcgtacggtatcttgggccgagagagcacgatgacgagcttctggaaggaatggctcaaggccgtcgtggtgccaatgacggaaagcagtgtacagcacgtgcctccaccctcgccgcgcatgggtgtatggcagccattagagcgatatgtgatgaatctctgcacagaagcgttctgtccaatatcttcgaagactcaggtcgagattgcgattcgtgagctgcggttgtttgcacgcaaagaggcacccaatgagatcccaggttcccggaatgtatgtgcaccacaatcttgatggagttctctgtgggaatttcgctaactgatttctagaccgatctctatgccttgttccgaactttgtcggttccaaatattatcattctctttgaggtaggcttgatttgccagttcagttgacaagacactgctaacaactcacagtacgctcttactgaatcccgtatcatattcttgtcttcccacacctccatgctctatctcgcgaccagagcgttggtcgatcttttgttccctctggaatggacaggcgttctcattcccgtccttcccgcacgcttaatccaggctctcgaggccccttgcccatacatcgtgggtatcgagcgtcggtatgagaaggtggagctgccgacggacgactttgtcctggttgatttggacaacaatatgatcgaaagcaccatccaaccgacttctcttcctcgtcatcagcgcaggaagctcctctctttgttgcaactagctgcccctcagcacggtcgatgccacgtccctaccgggcctcctgcatatgcaatcgagacatacccatgggactcgttcatgtcagagagcaaggccactttcacatccaaagcgcccgcaactaacctcgcgaaatatgtcggtctgaactccagtgcattcggtgcatcggccgtgacgccaggctcttatacacctcccatctttaacgtcttcctccacgcccgagccgagggtggcccctctcgtgggtactcatctcgcggtactgagcgcccagggaccagctccactctgagagtaagtgcctctccgccgtccccgagagagaattcacccacctctggcttcttccctcctccaacttcctcgtcgcgcaatgattccggtatggcgttgcaagcttcattgcgcgagaagcgttctggccatttcgatgccgcctcacgccgaagctcgtcgtttggaatgggtcgacgtccaagtgctccgttcctcggtcatgcttcgaatctctcattgagcactctcaatactgactacggagccggatccacatatgcgccatctgtgtatgcgcagtctaccatcgctgcgtccacgattgtccctcaatccacataccaacccgttggcaataacgagggcacttgctgggctgaaggtcactatttccaagtccaaccctgggatgacaagttgacatgtgctatctgtgatgaactggccgaggaaaatatgtacaagtgctctgcatgcagactgacagtccacaaccgctgcgcgtccatggtgtgtctgccgtgtgatgctgccttccatccggatcagattcgcgcggcgtttgtcagatgctttgccagcttgttctacacgtataagaagttcctggtgcctgccagtggcgataagaagaagtccggtatgttttacaattttaacatggacgctttcatgaagagccttccaagtgagcacgccgagtatatcgcaattctacagcagacacaaggtaagtccacgaattctgctatcgtaccatggaggtaatattgacccagtactaggattcaacgagttcattagtgaccgtgagcgaacaaacccgaaaaccaaggatccgcgcatgaccctgttcgacgaaattgttctttcgaagcgtaaccgcggccgcacatccatcttctccggccgttccacaacagacttcctctctgacacctcgaaccatatatggcgtacagccaacgctaccttcttccccccaagcagccgcagccagcagaatatttcatccgactacggtagaggagttcgcacaagaggtacgcaacgctccaacacccaatctgattctcccactgacaatctccctgcagcaccggcaaatctagatcctagcctgatgacagaaccccgcatgatccacggtgcgccacgggtttccaagacggcaaatactgctcgtagaaagccgttgcctaaactgatgaacgggctcgccgtctctccgcccagttaattggtgtgatttccacacgcgagtgacccgtccatcatctcgtcgatatctgccctgcccttgtgcgggtgggtcctttgtgcgcgggcaaagtgcaatgtccgcctttttgaaacacttccctctgtttccttgcgcaaccctgaaacctgaaactcctcccgattccggctcggacttcgatttccggatggtggcgctgcgcagtccatgctttatctcacgacaagcaaataggatggcagttcctgctgcgtgtcttcgtttgggcagtgtgccatccaagctgagaatgacaggccgctggctcggctctactccttgcttaccgatattaccccgcaaatggaactgcatgtggttgcacgcctttagcctctctcccgcttgaacttgcttcccttatctgacctaccatgccttatcgtggtagaaccgacgtctggaaagatgtcaaacaaaccacgtgccgatcctcagttgcgttgctgtcttcgtacatagtgttgactccggcttgatgcacggagccatgaccaaatcccctaaaagcgccatcccggattgcaaagcgatgtggtgattatttgtgtgcctgatattgattgatacatacacgtttattctctgaaccaatacctcactctgcttctcttgcccttccccctcttatctctcggcctgcgtttctatcttttccttcctgttactacccaataccccctcttgatttggctggtattttctctccttctgtcttaattggttgtcttaagtacaagctgggtggatctagtctcgatttctgttttttccatatttctcgtcatttcggtgtcaatcatacctatgctacgtggttcacgactatccttcgggtatattttcctttcagatctgatttgacactgtgacttaattttggttgctttccttgcatcaaggacagaaagaagaaggaacaatacatagatggttgttgtaccgtgcatgttgcgaatataaaactatctcatctttgggtttgcgctttgtacaagtatccatgcactcttccaccaatcccgatgtctgattcattgtttatctgtctgcctcggatataataggctatgtaaaggctgagcactcgctctcccgagtctgaggccttggatcggtggttttccctcgtatcggatcatggcggtgtagtacagccctgtcagggcatcgtgaggctgtgccggtgccttaagatgtttcataaacgctgatgggaccatacaagttgtagatgcggtaattagcaggatttcttcggcatacaactgctggaacatctcctttccactgcacagaatcccaattaatacatccagatgtagtataattaggcgtcgcgcaagatgattggtggagaaacccaaactccgctcccactttcccccgcattcgcattcgcattcgcattcagccgtcgacctacgtaggattctcttgtcgcgcattgggtggaacctccgcgacgagttcttccatcgatggcgcctcaaatgccgtcctttctgatcgtcgcggctgcgttattggattgacttagcgtccctttagtcgacttgtccccaagttaccccatatattcgagctagcctcgatcggcccgctccctttttcctaattgcgttggaaaaatatcccatgctttaatatactacctgcctattacattacccgggtcctggccgtcgagaagcgaattgcttggtccttgcgctcattcaaccctccccgactcttatttctacccgtcttaacccatgcttcgacctgcacaaatatcctcgccagcaccaagtatgaaacccattgagactgccgtgccatgattccgacagcctttccgcagcacatggccacgccgctgctcgacgatccccctatctctgccgccctaaaagcccaggctcctcctagcgcaaaccccaatatcgccgtcccttttaatgctgcgacaatcgtccctcccgctactatggccaccgagcccgaagaccagacagtcgcgagcattgctgcgccggccgccgctactgccgtgaggactgtcgtgatcatctacggccagaatcaagagcatattgtacaactggttgcggaaattctgggcaagccatggacaacagatgagtcgcttgggatgcttgcgcgagccagcaatgcattggtagtgggaatcttagcgcacgatctagcgcgaagcttacaaggatgcgagcgatcatctctggtcctggtaaacacgtactgcgtggaagacgggtctgcgccggaagacgcgctcaccgagagctgtgactatgagttcttatattcgcggagtccgttcctgcgccgggacctggcgcgatttttgtctttgatccttggccagacgaggccgcatgatgatttgcggaccaagactaggacgaattttatctcgactacttttccggatgtgcatgctgctttgccgaatttggatatcctgtctgtggggtcggatgctgttgagatccgtgtggatttgctggttgaacctgtgccggagggctcgaccgctccgctagttccaagtttgaagtatgttggtcagcagttgatgcttttgcggcagcataccgagttaccgattatctttactgttcgttgtacgagggagaatggaaagttcccggtagatgaccctgcgctctgttacagatacctgcggcgcgcgatacaatggggagttgagtatatcgatgtggaagtgtggctaccggaggatatacggcgccagctgttcgaagcaaagggccatagtatgattttatctgcgttccatgacatgtccgggacctggaaatggacatccgaagaggcacagcgcatatttacggaaagcgccaaatacgccgacatcgtgaagatgatcgccatggtccacacaatcgaggagaactatgaactagaatacttccgctccaccatcaaaagccgaggctcagggccacctctgtcagcagtcaacatgggccaaatgggtcagctatctcgagctctcaacaccgtcttctctccaatcacccaccccctcctcccaatgatcgccgccccgggccaactaacggcagcggagatcaacgaggccttacacatcatgggccaactccccaaacgcgagctctacgccatcggctcattccgctcaacgccacattcaatgttcatggagaaatgtataaacgagctcggcctcccgcacaacttcacctcagtcgacctaggcccaaagggctccatggaatccgtcctcctacaaccgcacttcggcggcgcctacgtcaacccccccgtcccaaccacaactagtttcatccctgcagtcagcgacgcagcccgcgcaattggattagtcgacacaatcgctatgacacccgacgagactgctgtaggaacgtgccgattaattggcgaaaacgccgcctggaaaggcatccgcgctaccctgacgcgcgaatacgtgccgtccgcttacagcggccgggcggcgataatcctcgccagctcacaagcagacgcttcagcggcgattttcgcgctacgcagtctggccgttggcgcaatctacacagtcgggtttaaagcgagtggcccgctcgcggcgggtctggagccgttcacgtccatccagtccgtgaaacgggtcgagcagccctttgttattgtctctgcgctgccgccggagaaatcgctgctcgtgcagcctttgctgagacattatggtgttaatggtcgttcgtcgccgccttctactcgtgggaaggtttatcttgatcttacgagtgggacaagaaagggggatcctttggctgttgctactagtgctggatggacggcgtatggagttgaagatgttagtgcttggactaccgttgagacgcttaggttgcttgttgggcaaaatgtgccgtttgacttcgtgcgcatggcgtctgggagacctctgttctagtcatatatattataccgcatacctacgtaggtgatttgtagttctgtttcattgtttgttgatgccatgactgctaacgaccagacatatatatagatgctgaaagataagaacttatcagaaaatccggggtcgacccctcaacccctcatttcctccttccaaggttaccccaagctttggttctctctacctctatgcatatttccttctagattcatcgaaacaaacagaaaatgcatctgcgtcctgatcatgcagtccgagacctcccaaccctccacgcctttatcgaacaacacccacttggcgtcctcaccacttcgctcccttcagagaatcatcccacactccaatgcagccacatcccctgggtgttggacagtgaagcagccctcgaacccgagttaccgaaggaaacaaccctcgaatctgagttagcaaaggaagcaagagtacccgatggcagcacttccgcaccgccatatccctccctgggagttctccgcggccacatcgcgcgccaaaacccgcaaagcaaagcgatggtaaaatctgccttggaatatagcaccaaaacaaccagtatccccggcgcatttcctataaccaattatgcagaagaaccaccgacatcaactagctacactctccctgatgaggtcttagtcgtctttaccagcccagtagaccactacatcacgccgaacttctacacagagtccaaacccgccacgggcagggtcgctccgacgtggaattacgccgcggtgcaagtctacgggcgggcgactatttatcacgatgcagaagacgaacaaacagagctgttcctacgacaacagctgggtgatttagcccggcttggagaggaaggggtaatggggtttcaggatgagtctgggtttggttcgggttcgggttcgggacctgatgtcaaacacggaggtggtgaaaccgaaactgggaatggggatgaggagggggacccaccccaggaccagaaccaaaaccaaaaccagggacagcgccaaaacctgatccctgatatgcagctgaatcaggggtcgaagacggccaccggggctggcgggcatggcgacatcatgccattgccgaggtcgacgtcagcaccttggaaaatcgccgatgcgccactggactacattgctgcgcttttgaagaatattgtcggcatgaggattgaaatcacccggattgagggtcggtttaaggttagccaggaacggccgcttaatgatcgtgggggtgttgttcatgggttagagagcatgggtgggagagcaaaggatatggcggactttgtgaggagagggaaggtcttgcctgggcaatgatggcattaagctttttgtgtgtatagatcctaggcccttcgagcacgaagtatccgcagtacgtagactaatagtgccaagctcgcgaccacgtacggagtgcagcccctactccgtagtgttggcggcccgggcttggcatgattactcaacataaaatggtctgtgtagaagcgcaaactcctcggaaagttaaaaaaagaccaggatggagattccgtctcgaatacagtagctgcagtggatgatcagggatcggacgcgtcttaatcagaaggtgtaataagcgggggccaatagtagtcctgtaacagccaccttcatagaccgtaccttttgcacatacctcgaatagttctgcaggaaacacgggtaaaatgaagggtcttaggggtctagatggcaactgagaacccccgtggtgggatggtggacagacgatagctattgactggctagatacaatcaagctactgcaattacgtgcaattatggggtatctggatcatctcggatgctggcggcgaagccctaaagcgggtggcattccataaaggggaaccatcccccgtctatacagattaaaggggactgaaaccagttctgggttgaatgggatgttagaagtagagtgagtcgagaataagaacgaacataacagctacatatcttcattgtacatatatatcatcttctagcctaaactatggaataaatacaaaaatctcctctccccccccatgtcagcccgaactggggaattccggcggcacatcacttctccgcatttcttcctctccgcaacctgatcatggtataggatttcccttttttcctaaacgccacagccatgcgcctgacctcttgtccatcttggccgcggccgtcttctttcttcttttcttatctctcttccatgtagaagtgccatgtctcgtcctcaggtcagcatcgaccgtctcacgccccgccgtgcgacggttgagccgcgcgaaaccatgaattgcaaatcctgtcgcaagcgcaaggtacgtctactcagtgctagtgcgattggctctgtctaacttgttatagatcaaatgtaatcgtatgcgaccgagctgcgaggcatgtaaggtcttccagtgcccatgtctttatggtgagtcaatcatgtcccctctatatcaaacgactcctctgttaaccttgttatgttcaagatgccgttcccaaaaaacggggccccaaaacagatgtgctagaagctcttctcaagcgggtcgatgggttggagaaacgcctccacgacgaaaagaaccccatctcgcccacttctcccgataccgcagatgatcagccgagctttcctgcccgtcgcaacaccgtcgacgcttcttttaatatttactcttcgagcgatcgatcggctctgccaacttctctcccccaacatgtggatcccttcattaggccaaccggccacccagcaggtcttctgcaacagccctctccgacaaacaatggtccactatcggatgcgaccctggatctttacttcgagcgactgcacggcaagccattttatatattagacgaggcaacaacgcggcagctccatcaactgaaccaattacctccgtgtttggccatggccatctcagcaatgacagtaaggtaaaaccaccaagcttccaagcgctgtcacatagcttacatgtttgactgacgaatcttagatatacaacctcgcctggtcaagtggaacagtcactacgttccgggctcgatgcggcgctacaagcaagacgtatgattgaagtcgacgatcctacagtagaaggactacagactctattgttactttcgcaagctttccacgcctatggtcttggaaagaaagcttatatgacattttgtatgcttggcctcgatcctccatggtggaatgaatttgactaatgatgctagcaaattgtgttgccatgatcgtcgcgctggatttgtatcgggaggctccctccaagcccaatatttcgcctgccgagcgagaaatgaggcgtcggctattctggtctgtttacttgatggacagattcattagctgtggatcgcgacgtccatgtctaatcaccgatcattcggttgttctgcgcctaccgtcttgggcaccacatgcagccggtctgaacatggagggagagctcttccatgtcggtccgaacattcaatattcttctgattcccggcgcaaatcaccaagtgctgcctctttgctgattgatatcacgcgtattcttggtgtcacgaataagtatctggcagctggcggagtgaaaggcgactctcacttcccatggcatgcgctttctaatctatctaagatccgacaagaattagatatatgggccgctggtacgcaggacgtctttgcgtctatcgactcattgttcggccaccctgagagtacaacacttttgctgagcaagttgatctaccatttggtgcactgtttgatctatcgcccgttcttacccattgacctggtagagctccggggtacagggcagcatcagtcctggcaaattgaggccacgaacttgtgtttttcgcactccaatgccatcgcagagctcgttgaactgggtcgcaactccccgctaatcgagtggcctgctttcgtcgcatactgtgtgttcacagcagggaccgtgcatgttcacggtgtgcactacaagggccgcgaaggagaggttttctcttctagcgctgaattcctgactcgggagatgcaccagcttgcttggctgcgtaatatttggactggcgtccagcatcagcgtgagctgctccagactatctatacgtgtcactccgaattagtacgcaatcttgccagtagcccaatgcggttttcgccagtcttccacctcgaacacttcctcgaccgatatcctggtctggcgttagatggatcacatgttcggcttatagatgcaggggatgatctagctccaaggtaggtcctgctggttcgttttttgcatacatattatatgatcctaactccgaagacagtgctgcgagcttcattgatcaccaggatcactactaccaacgaccaatcgccacaccctcatatcacaatccttcaccctacttctcaaatacccggcctgggccctcgagtccgttaccatccagccaggcctcagatatcgaccgtcgcaactcccattcccattctctatctcagaagccatcccacccaacttctctctcgcccagtattcaattccacacgatccaaggcaatcaacagcaacaatcatcatctgtcttctccctcccagccggaacagacctatccggtcccggcacatcagagaacacccacctctcgatcccgggattctccccctcgtcctttggactctccccaccagcctacctcaccgacgcttccatgcacatagcaccaacacccccaaacccgcaatacgcaaccttcccattcgacaccactcacgcaaatccgaacggaatgacgcaagcaggtcccaccgccctgaccccaggcggccagtcccacactagtggcactcacaccacagccggcagcgaaaacacatctgaaaaagacccttttctgcgcttgctagaacagctggctgagaatgagaactcgcagggcgggcctagtgagcttgagttctttctgacaggtaccggtgccgaaggtgatacagctattcctcttgagaaagatagtgcttcgtagtaggcggaaattggtttgggaatgataattccctcatatatattctcattctgtgtatatccttcgttgcatagcttgtttgcatgtaggctatggccgagttgactgatacccattgtgtttattgtttctagctacctagttactatgtgagatctgagtcaatctatcatataaccttggaatgctcctattagagctagacagaatctcattactaattttcattgttcacccggcatctgtgctcttcgcccggagttaccccggtctcggcggagctcccccccggaacnnnnnnnnnnnnnnnnnnnnnnnnnnnnnnnnnnnnnnnnnnnnnnnnnnnnnnnnnnnnnnnnnnnnnnnnnnnnnnnnnnnnnnnnnnnnnnnnnnnnnnnnnnnnnnnnnnnnnnnggagctccgccgaggaaccccgcgttgtaaccgatttgtcactcctctcctctcccataagatccttgaccatccccttcttaatgtcacccatccagcgtctcaaaccaatccaacgccttaaatctataacaagtcacctccaacaaacctccaaaatgaaactcctctacccaacctccctctacattgacgcgaagtccctagaaggcttctccgtcgaattgcatccctacgacgtcacagtcccaattcccgaatccctaatcgacgccgagttcctagtaacatgggccaacaaagccacgaacctccgcgacgcagcctcccgcatgaagaacctccgctggatccagtcgctagcagccggaccaaacgacgtcctcggtgcgggcttcgacgcctcccgaatcgctatcacaaccggctccggcctgcatgacgagacagtcgccgaacacaccctcggcctgctacttaatgctgtccgccgcttctatgaaatgcgcgactaccagaaccgcggcgagtggcccgcccacctgggcggcccccagcccgatcgcgcccccggcacgttccgcaccctcaagggtgctaatattaccatctggggattcggaaatatcgccaagtctctctcgcccgtgctgaccgcgctcggggctaatgtcaccggtgttgcgcggagtactggtgtgcggaatgggttcgaggttgttgcggaggatcgcttgcaggagattctccccaagactgatgcgcttgttatgattctgcctggatcggcgagtaccaatggtgcgcttaatgctgagcgcttggctttgctgccgagtcatgcttgggttgttaatgttggccggggaacttccgttgatgaggatgcgctgcttgcggcgcttgaaaagggcagcattggcggcgcggcgctggatgttttctccgttgagccgctcccgaaggagtctaagctttatgccgcgcctaatcttattctttcgcctcatgctgccggtggacgtccgcgtggggctgaggcgcttattgcgtttaacctgagacggcagcttgctgggcaggagctgaagaatattatttgagcttgatgtggagatggctgtggaggtttcttgatagattttatgagtacatttacgaagagggttagacgccatgctttgcgttggtcttgttttgattacaaggaactctagaaagacaattacagccgaattacacaatcatttgagaactcagaacataagtgtgatcaaaattaatttgatataaacaaagagggaagactatatacaatttactatatacaacaaagcacaccaaaagaccctatttttcaaaacaccgtatcgtaaatgccatcactgtgtcacctctcagatgcggggtttactgggggcacagcatgaagaagggaacgcattcttcgactgggtatcaacacaaatagcagaaggaggcacccagagggcagggttcttctcgaagaagtttgacgcacgcagcataatgctaaccggctcagcaggcatgatggggaaatcctcagttcgcgggaaatgcgtcagaccgaactgcaggtagcagacgatatcggtgttctcgatgttctcgtcgcgcttcgcccagtcggcgatggtcgagttgaaggggtgtccctcggagccgtcagactggcagacgtagtcaccagcggggaagagctcgtagtccttgtaaggagtaacccagaggggcttgcgggcgaaggcggcacgcttccagacggtgctgccgggcttggcgagcataggggggcagttgttgttgaggatcttgtaagcaacgggctttttcgcaatggcatgaatgcggttcgggttaatgatgtcccatgatcggttggtctcgtagcagtagtctgcggcaccctcgagggatgtgcggaggggagtcttcttgctgtagaatccgttaccgtaggggttctctggggagccgacggcggcttcggcggagacggcgtcgttctggacgacggagttgttttggccgtcaatttcggggtcgatgcggagggagaacaagtgctggtggttgtgggcgttgatggagggggcaacttctgtgccgaagggagcggcggtttcggtcgggtgcatgcagtaggtgttcagcataccggtgagcttaatctccagcttgtaggtaccatccagggtgaagatgtggtagaagccgtattcgtagttggcagcggtgatgatttgggacacgatgagcttgcggtcacgagcggagatcactgtgccatcacggtagtcggtgtgcttgtagaggaggccgttgtcttcctcgtgaatgcagatagcgttcttgacaacggcggcctcacccttggaagtggacatgataccatccatgtagtggatgacacccttgcaatcacaacccagctttagggagttggtcatcaggccagtgccgtactcgccgacatcgaatgcatgcttcttgtggtggggcttctcggggcagccgtaggggacaaccatctcaacgacggagatacggttgaagagagtacgctcgcggtcctcgtacatgtcgtgggtgcgcacgtcggaaatgacaataccttcacggtagttgaagccaatgtgcatcttgaagttggcccaggacagctcattgccgcggaccttgaaagagacaccctcgggctgggagatatcgatgggcttgaggcgatcgtggttgtacttgtcgctgatatattcggggaggtagttgtgctccttgagaggggcagcggtccgctcgccgttgacgtaacgaatgtcaacgctgagaacctcctcggtgtcggtgtcggcgacaacgctgaaatccagagggtgggcatattggttatcgaactcggcgttgcggtagtaagccagaccctgctggaggcggtggtcgtatccccagcgctcgtcgatgccgatagcccatgcgtcaaagaagaccttgctcatgtcggtaattccaatgtcattgcaggcccggataacgcgagcgtccttgcgagcaacacgctccatcacatcaagatcctctagggtgagggtaggcatgacatcgtgaacgtccttccattcctcaaccttgccggtggcgagatttgccaccacctctgcgatcgtgttggtttcggggacaaagacaatggcgaaggcacgacgggcaggagcggggacggcgccagcgcggaatgcccggtattctgctttgataggttcacggagtgtgatgcagttgaacttgacaaacttggggttggcgtattcccggatgatctttgccgcttcgggaatttccttgatagacagttgatctagggttttgagttagcggagctctcggattttacacagaggacatagcatacctaacggatgaggagtgccttttggcagcatggcagcggcggcaacactttcataatccccgtcgcggaagattgtgtagccaggaattgactcggtatcaggagcagacgccatgatgaagatgtgaaaggggtatcaaggggaaggagagagttgtaattgtagaaaaaccagaagttccattccaaagctgcgatagaccttatatagctaatcgaccttgaacgtctgatcgaatttcgccgcatgtaccttcctaatcgggcaatcaagaaatatatctataacctaagcagctccgacaaagggagcgaatggtcccgagagtgggtactctggccgttgctcaatttgggttaaagtctggagaagatgtgtctttgcacagcatgtgtccgagactttaattctatgccataatatgctttgcgtaaagtgtttgccatcgaaattatcagccaatcgcaatgcaacggctcggagcgatgtgttggccacagcctttcgctagtggttgacctaataaagcaagtcttctgagaaagactgtgcatgggcactagaggaaaaacctagcccaatttgacaatatctgatctcttagacgaattaggggagcatgcgactggcagggttggtgatgccaaggcgttaaatcaagcttattttcacgtggtcttgatgacataatgtaagccgcatccctagcctggggcagcccatcaaagccgttctatcacacatgaccccccctgttttactgtgtcgtagaaatgatcaatatccccattacatatggaaacggacgagcaactcgttgaccatatctttaacctaaacacatgagacagcctttgggtggacttgcctgttttgggttagcggctcttgctatcagtgactggggactcgtcaatccacgtctatccacatcaagaaacaccccactccccaccgttttgaacctcagaaatctggagctcggcctttttttaggtggagtcgataaatgtatcccgataagctacccagaatggcatgtccatgcgaagcaattgtcgcaaattacatagagcttgaagaaatagttacaaattcatctcctctagcttcactgtcttctccaaacaacatcgcgaagtacatataatcatggccgacttatctgttcagctcacagcccccaacggccacacttggatccagcccaccggcttgttcattaacaaccagtgggtcaagtcttcgaatggcgagaagattgctagcattaatcccacgtgcgtgagaaattaaaaactaagtgtccatgtcttaattccctaactgactggcgatcgaacagaaccgcaaaggaaatcacatcaatccacgcagcttccgccgaagatgtcgacaaggccgtcaaggcagcgcgcgccgctctgaataacccctgttggcgcgacctacccggttctgatcgtggcaagctgatgagccgcctggcgcagcttatcgaggataatcgcactacgctcgccactattgagacaatcgacaatggaaagccgtattccacttcgttcaatgacgacctgaacgagaccgccgagacccttcgttactatgcaggatacgccgacaaggtctttggtcaagttatcgatacaacaccggataagttcgcctacaccgtacgggagcccgttggtgtctgtggccaaattatcccgtaagttctgagatcagtcatcaaacaccatcgaagtcaattgctaactatggcgctaaagatggaacttccctctcgccatggccgcctggaagctcggcccggccctcgcctgcggaaacacagtcattctgaagccagcggagcaaacccctctctcagtcctcttccttgccaacctgatcgtggaagcaggcttccctcccggtgtggtgaacattgttaacggacttggcgccgtcaccggagccgcactcgcctcgcacatggacgtggacaagatcgccttcacaggcagcacggcgacagctaagcaaattatgaagatggccagcgggaacttgaagaatatcaccctagagacgggtggtaagagcccgctgattgttttcaacgatgcggatctcgagcaggcggttgaatgggcccatctcggcatcatgtataaccagggccagatctgcacagccacatcccgcattctggtacagaacgaaatctacgaccgcttcttggatgcatttaaggcgcaggtgaagactgtctccaaggtcggtgatccgttcgaggagtccaccttccagggcccgcaggtgacgcaggctcagtatgaccgcattatgtcttatgttgaggttggcaagtccgagaaggccaccctagtcactggtggtaagcctttcactgttggtgatggtaaaggtttcttcattgagcctactgttttcgccgatgttacgcccgagatgcgtatctaccaagaggaggtctttggacctttcgtggtgatttcccgattcagcgaagagaaggatgcgattgagatggccaatgattctatttatggtcttggaagtgctctgttcacgacaaacttgactcgcgcgcatcgcgtggctaaaaggattgaggctggtatggtctggattaactctagcaatgacagtgattggcgcattccattcggtggcgtcaagcaatctggtattggtcgtgagcttggagaggctggtcttgctgcatactcgaatattaaggccattcatgtgaacatgaagtcgaagctttgagaacaggactcgaagggcttccgaatctggagggaggacacattatattgtacatagcaaaatcgaaacttccatatgacaaaaatggatatctacgcaccttttctatctttcttttcatctggtgctttagttgaacttatctgtgcagagaagagggtcatagaaaaactgattttatgtgaaaagaaggaaatatatttgaacaagttgagcttttagttagaacacgaataaccacatcaaggcgacctcctagcagttactagtggaaaacaaattcattcagggcaaattgataattcaaagagactcgtgatttttgatcgctgagttggattagggcgcttgatgcaacaatatataatggggaaacctctgaatgatgtcaaaaccaagggattcattaggtgtttgcccctcgcgcaggacttcggtccacataaatattcttagatctgagcttctttatacattttatacattctactattcctatattcacaacgtactgtaaggtagatctcgacagctctacggggctcaactcaactggcaacgcatttttctaaactaaatgaaagctgatctatatacgcaaagcatggatgtcaatatatatccaattgacatcccagaaaatccatattttacttgacaaatccgaattcaccaagcgaaccgcatgtccaagaacattcgcaacattggatgaacctcgagcgactcgatccaagaaaacctctcatcgatcttccttttttggctcagggatcggatcattcggaaccgcatgggccatgatgacatgaagattggattcctcggtgttgagataggtgcgacttccctggacgaaccagaacgacacggcgatgacaagcatgacgccaaacacaccaatggcgtaattcatctcatcacctgtgggattaggcgcggtagggaagaaaaagaaaacagtcgtcacactgcaatacacaagggtgacccagtttaccggtgcacccagtctcccaaggttgaactcgccaccaggtgggagtttgtctcggcccatcagcaacagagtcatgacaggaagcccgtatgagatggtcagggcgatggtactaacgctgaggatggcgttcagcactgtctctgcaaacaagaatagaattccaaccagtgctatgagaaatccctggaaccagagtgccctgacgggggcctcccagtaaggactcacttccgataggtaggtgctaaaggggagtccaccatcgcgggcaaagccccaggtgaggcgggatgctgtggtcacgatgctgactgcctggcctaggccgttcatgatgaacaatgcaatcagcactgcgcctccagtctggcccacggtttcttggacgagttccataaacggcaggccgctaggcgagtttaccactgtattgacgtcctgaatacagaagaggcagaccaccatcaatatgaaaccgctcactgctccggtgatcacggcgaggtaaatgactttcggagcgttcttgcgaggtgcagggatctcttccaccaagtgaatcacggcgtcgaaggcagtcaacccatacgcagcctgcactagaccaataaaccagacaacgccatcgggccagccagtttggttgatccatttcccaaacacgaaagaggcgggctggaaggagagaccgtctttcgttccaactgaaataagcagggcaaggcagaacacaaagaatagtccaaagaaccagactccgacaaaattgttcagccacgggaggaatttctccctccgacaacccaccacattgatcaatgtgagagcaaagacacacgcaatataaaccacaaactcaagccaccccttcgacgcaccagtccaggttggactgaacatgaccttcataccgagaaggaaattggtcataaacgccacctgggaggcggccagtgtccaccacccaaagacattgatccaagcacacatgtacgagagaaaacgtccgaagtgtgagtcccagagacggtagatccaataggcctgtccgagggcagtgggcatgctgctacatatctcacccagcgagaaggcgacacaggtgttgcagaatgtaacaagagacagtccccataggattgagacagggccaccgttgatgagaccgtcggagagatcctgtgcaaaggttgaccatgttcccagcacgcagaatgctaacgctagcatgctccagatgttgaatttgcgggcgaggatttgctcgtggccgaattccgcgaggtcgttggcatcttgtgtgtgttggtcggtaggtttgacggttggttcgttttccgcttccatttcgagggacgggagggttcagagcgtgcgagtatcaagaggatttatagagtattcactctaggtatttcccagcaacgtaattgacgccgttgtgagaaagaaggacttgtctccgggctgtagatcgtatactcctcctgaaggcgatattgaaggtccaataatgaggtcactgaagcagttgaatgaaccggatgtcccgtatgcccattcacaaaggttttgttgttttttccgggaatcccatggcgtcggcctccatggccatagaggagggcacgttcactggatattcaccgagtggcccacatgatagatctaagccctgaaggcattttacacgattaaacgacacatacatactgaagatctgtacagagatccagttttgctccagtttttttccaccccacatccgacgaagattgaggaatccctctctggaaggtagatgcggtttgttacgtgcagtgctaattatatcgatggtatttggcgtttgctggatatccgactcgagggatcaccgcggatgttgttctgatacctgattccttgactcacggctatcagatcctcccgaggtcggagttagtcgggttaatgcggctgcattcattgaagcccaacggtcggaaagcctcgatattgtctcttggaattgataattgacttttcgacaagtacaatttcttcatcttcacggcaggactaaaccccggaaattatagaactgtcggcggagaggctgaaaaagacaagcttgtttctcctgcatctgcatggaccttccaaaagcggcaagctcgccttgaaatccggtcgactttgaaactggaccagcttggacttcacagaccatgagaatgagaatcttttttaagaatgcgaggaaactagtgagatatatccctggcagtaacccgggaagcactccctataggagtttagaatgcgctcactgagatctgtgtttggccaatcacagtccgagtatgcgcatagcaccacgcccgcctcctcgcttgcgtgagtatatatgagtgaattgtagttgtaggatttccagggggtttctgtccttgctcttgttttccttcacaacagttctctcagtagcatgccttcgaccgagaagcaaaaggacctctcccggcgtcatcgctctttcaagggatgctggacctgtaagaaaaagaggattcagtgtgacgaagcgcgcccagcctgccaaaaatgcagttcccgaggtctggcttgtgagggatacgagatccgattgcgctggggagctggtatcgcctcccgggggaagtactcgggcgccgagaagcccgtgaaagaatatataccctcgcggtcgaaacgaagattggatatacgagacgagggggacagatgttttcctggagatgaagatcgtcagcctgctgtggtctcgcaacctctgacaaaagaaggtattgctagttcatgatggtctttataattctaaactcacacattcttctagatcaaaatcaattagttgccgaacgagcaacggtcaatatacctaactcatgggaaccgaattctccacgaaactcagctatcaaaaagcactttgagatacctaaatccttagccactttgagtgtaactgctgtggctgtgaatggtcgggatgaagatatatcgagtcaatatgcccagaacgcgggccgacggagtatattggcttgacctgagttttcattcttggttttgtacttgagcactgcaaatcactttttttttatcatgaatttgggactaggtccacagcgaacagactgagacatatgaaattggtattaccatattaaataactatatcctattcatcctcccggatcgtctcagtacctcctttccgccctttttcttgtaaatgatcagtcagctgggaagcttcagatcgatggcctggtcgccgggtatccaaactatcgaaagattcatagaaatgggatgatcggccgctcatcacgttttcaatcgacagtggtgacgacaatgagagtgacgatggacgtcggctgtgggctgctggataggagtactccgaacccgtctcactaggagtctgcggtgagacaggagactgagagcctcgtctcggatcgaggttgggcccacgttcgggttcggacttgggaggtccgtcgtgggcataataggcggtgttgaatgacgttggaagctcaacaggtgatgaatctggtggatgtcaggtttagtactccgcaatatctctttcctatcggggattgaataaagaaagtcattaacataccatgcatctcatatagcgcatctcctccagattcaaccgtgccaggggtcacaggcgagatgagagactctggcacggttgacgcctgcgtcatcgatggttgtgttgtcgacggctgcgttcctgtggtctgcgtcgtccgcgccgtctctaccgtctccataccagtcgatgaagatactggcccaggcccaggtgcggctgggccgctcgcatacatccattccggaggaaggttctgaggttgcgcctcagcagcttcggatttagcctccgaaacctcgtgtttacggtgacggcgacgataaagcaagaatccgacaaggagcgcaattatgagcagacccaagaccgcaccgattactccaccagcccacccggggaatccgctgcccccgctgctttcttgcgcggatgtactggcgctgccaccgctgctggtgctgttgctggtgctggtgctattgtacggccaatatgtctcgacagtcttgccatacttctttccaaaaatccccgctagagagctgttcgtccatgacgatggggcggtaatggttgcacttccattggagctaataagctgtcagccatgatgattgcattatgtactgctgaggtatactcacttgccgcctatcagtgccgtcacaagatctggcactttatacttactccaagtcgtgggatcatattcatcctcaaaggtcaaggtgttgagattgaaattgacaatgataccaccctccaggcaataagttgagtcgacatgctgccctccaaccgctagcatttgatcgggatatactttgatgcattggtgaccgctgcgactgtgtgtgtttgtaccattgtatgccttgacccacttaaaggaaggcagagacaatatatacacgtcgtccgacggattggcgttatagttcagaccatcgtatcccccatagatgtaaatattatgagatgacccatcagccgcactcgcaagcacagagcagaactccgtcagctgtggcggtatatcacccgtcgtgttctggagataccaggctttactctcgacatcgaaaacagaaactgtctccatgaacgtcgggctaatccttttgctctccgccgtccgggttgagtttgctttttcattccggaaaaactcaatgggttcaatcactccgccaatagccactaaaaccccagactcagatataggtacccagaccagttccgcccttgaacgagcaggaatgtagctcggcagtgtgttgtttgtccacttcccatcgctcatcgttgacatgtcaagggtgattaacgtgttggccgtttggttggattgaagctggtttaaagtgaagtcgccccagtccgccgcgcgcatcccactgaagtaaaagcccaagttctcgcttggcgcagatgcggcagcaccattggttatatatcgcgtgacattggtggaaaggtattcttgttgccagttgggtgcccacgagcttctataggcgccatactgatgcgcggcatacgacaggacttggttagaaggcggaggagcagagctatcggtattggggagcatgcctctgtaataaataatctaagcgtcagtggtttcagtgatttattagagagaggagggacccctacccatagagatagaactcgttgtcgttggcaaacatcgttccatcaacataattcggagctatgctagaagcaccgccggcgacagacatgttgctgaggagtttcataaaatccgatgtagtgttgaaagaagtagtgaggttcaggtaataaatggtggcctccaaatctgcagctagttagctatatgcagatatgaagatccatttgattgcgcctactgttatctggctggggctcgacacaaccatcgtcaaatcctctgcagttgttagtgtaaatcagtattgaccgtggggagcctcatacttctgataccatagctcaccgccatcgaggtagattgtatcgcgcagaatattggctacccgtgtcagtaagaagacaactatcggaaagggaaacaagaaatgcttaccacgcagaccttgccagttgcacatggaaacattgatttgagtcgggaatgtactgcatacggccactgcgcagtctatcacgaccagcagcgtcagcagcgtccccaaaaacaagctcatttttcaattgaagctcatcgcggagggtttccaattttcgatgacagatccaacaatggaatcctccaggatttactgcagccatcttgcccaaatggaaaagcgaggaagcggggtctccgaccttgcgatgcgcctttgttgttcatcctctttgttgtcacctgcccccgccctgaatacgagcagccaatgagagaagcaccaaggattaaacgacgtgtagtgcgcccgttcagcttatggccataacgccatgatcattaccatgatcgtattgctgcatgactaggatcatgcactcacggagatacagctgaatcaactggagctgccacattgtgtgctcgagttagcccctgattgcggtccataactccgtgtcgcgggatattttgcatttccttgtaccttgtaccgcgagatcgtcatgactatgctgcactgtccgagtcaatatccaccagagaagaagtctgagcctcgaacgaaatgttgggctttcttttattcaaaaaggggaccgtgcgtgtgttatgtattgggtgtcttcccattctgtcgaggtattttctttgtttagcttgtttaccttgctggccatcgccggaagaatttttcctacagacaagcaaagatgaaggtcgcggtcggtcggttgtcgctgttggcgattgtcttcggtttggtgacatcaagtcacagcagtctcatcaacagagccctcgcgctgccggcggaacaaaaggacgcattgaccgctacaattggagtcggggttacactttggctgggtgatggcgagtcttgcaccgctgaaactgtcacccacactgttacgcagaccggagatgtttctgcagctgccaccaaaatcatcaccgaggctaccacctacactataagtggttgccgaaatgcccacactctgagtgccattcccaatgtcggcattggacccgtggccgttgctgcaaataccgctagggcactgcccggaattgctcccataaaaacgatcacagattacacaaccgaggtgattacagcgtgtacatgcacagctaacttgactgttacgacaaccacctccagcgtacctgtacctgtgacaaccacctctagtttatcggtgacatccacatccagtatacctgtgacaacctccagtgtacctgtgacaatctccagtgtacctgtgataaccacatccagtataccggtgacaacgacctcgagcgtacctactaccagctcgagtatacctgtgacaacctccagtgtacctgtgacaatctccagtgtacctgtgacaaccacatccagtataccggtgacaacgacctcgagtgtacctactaccagctcgagtatacctgtgacaacctccagtgtacctgtgacaatctccagtgtacctgtgataaccacatccagtataccggtgacaacgacctcgagcgtacctactaccagctcgagtatacctgtgacaacctccagtgtacctgtgacaatctccagtgtacctgtgataaccacatccagtataccggtgacaacgacctcgagcgtacctactaccagctcgagtatacctgtgacaacctccagtgtacctgtgacaatctccagtgtacctgtgataaccacatccagtataccggtgacaacgacctcgagcgtacctactaccagctcgagtatacctgtgacaacctccagtgtacctgtgacaatctccagtgtacctgtgataaccacatccagtataccggtgacaacgacctcgagcgtacctactaccagctcgagtatacctgtgacaacctccagtgtacctgtgacaatctccagtgtacctgtgataaccacatccagtataccggtgacaacgacctcgagcgtacctactaccagctcgagtatacctgtgacaacctccagtgtacctgtgacaatctccagtgtacctgtgacaaccacatccagtataccggtgacaacgacctcgagtgtacctactaccagctcgagcgtgtctggcacaatcaccacgagcgtgtctgagactaccagctcgagtatacctgtgataacctccagtatacctgtgacaaccacttccagtgtgcctgtgacaactacctccagtttatcggtgacatccacctccagcatacctggaacaacgacctcgagcgtacctactaccagctcgagcgtgcctggcacaatcaccacgagcgtgtctgagactaccagctcgagtatacctgtgacaacctccagtgtacctgtgacaaccacctccagcgtacctggaatgacgacctcgagcgtgtctgagactaccagctcgagtacacctgtgataacctccagtatacctgtgacaaccacttctagtgtgcctgtgacaaccacctccagcgtacctggaataacgacctcaagtgtacctacgactactagctcgagcgtttctgacactaccagctcgagcgtgcctggcacaaccaccacaagcgtgtctgagactactagctcgagcgtgcctagcactagcgtttctggcactaccagctcaagtgtacctgtcacaaccacatccagcatacatacgacaaccaccctaacaacatcgaggactattactgactcgactgccactgctccggggccgacgacttcaccatccactacagtaacaaccagaaccacttccagctctgtaggtgttaccactattccagtgtccacaacatcagcggctgccaccgatatttcgactgtcactatcccaaataccactgtcactctcccgggaacaatacttccagggaccacagtcacgacaatcattactgagactgccactgtatcaagtggtagtagcactttacccgggtccaccggtaccacaactgtcacaagtccagaaagtacagtgatcagtgattcaacgatcattattggcactatcactatcccaggtatgttatcacccattggacgtcaagtattattgcaacagctaacagtatcagtttcgcaaacaaccaaaacaatcactcgtactctcaccgttaccgggtctagtgcgacatcgacccagagccctagcagcgctacgtcggtgcctgcctctgtatgctccagtctcatcagtaatccatcttacacaccccccgccgtgttgccagatgactatacctggggctgcgcacccggatatctctgcaagcccggtcatgcaggtgaccgctcgaattgcaatattgaagcaggtcttcccgaccccggatacgtctgcagtccctcagactgcattgtggctccgcctttagacgttcatccgtcttggcagtacaatgtctcgaacatttattacaacctcaatccggaggacttcggtctcaattattctatcttcgaagacccactggcagccaacaataagcgcgacatgtcgttgtgggatttcgctgtcgcccaaaggatcaagagggccgacataacgaacatccctacagtctgttacaatgattgcctcgatgctgcacatgagcctcaaatgcttggaaagacacctgagctctgcaagagtgactcggcgttcatggaaaacttggatatttgcgaggagtgcattaccaacaacgctgaatccggctctgatcaatattcatccataatgctgccgacttttgcacagtggctgaatttctgctccgatatggtcacttccacaacagcacaaagtgtgaccagtactcagatggacactacggcgacgagcacccagattaccgctgctaccagcacggaaacatcgacagcagccacggtcacgagtactcaggctagcagcgctgaagctagcagcactgaagctaccaccaccgaatcggcgaccactgaatcggcgaccactgaaccgaccagcaccgaatcgaccagcactgaaccgaccagcactgaaccgaccagcactgaaccgacgagcactgaatcaacgagcactgaatcgacgagcactgaatcgacgagcactgaagcggcgagcactgaagctaccagcattaaaccgaccagcattgaaccaacgagcactggaaacacaggaaatgaaaacacgagcaccgagcccacaaataccgagacaacgagcactcagtccgacactgctaccaccgggaccgagcaaatatccagcccagagacaactcaaccagtcactctcatcgccatctcagcttccggttcaattgtgaccacctcggtatctggttcgcttgtgacaacttctttctctgggtcttttgtgacaatctcaacatccggttccctcgtgacaagcttagtccctggatcgatcgcgacaacatcagtatctggcgtgcttatcacagcatccttgcccggttcgatcaagaccgtatcaagcactctagggacagagactggcagtgaaagcacatctgacaatgctgccagtagtccgtcgggctcggttcagacgagtcagacgagtcagactgattcggcaacgacctctaccttttccccggcctacaattcggcaggatcttggaatatccctagtgttggcttaattggtctcttgtggactgctcttgtgccactcctctagaattctctttttactgcgtttggttttccatgtcagatgtgtgtgtgagatatttggtcaattttggaggtagttggtggatttattagtccattttaataaggatgattcaatgaaaacgcataaaggtcaaagaaaaacactaactagggtaactatacattagtgcttatatcatgtttttcaagtggctatgatattcgaaccgcctttttgctgttgtggtctcgtgccgatcacatgccgctacagtcttctactaattgctctctttcttaggaatacacaccaccattcctggaaaataactaggtaaagtgagtgaccgcacccctgggataattgtgtactgccacgcgacaccgctcaggaaccttggaactttattttggtgactagtctccattaggaaatcaagagtataaggatgagagatttgttgatgttcagattactgagtacgggaacaatgagattggctcttttatgatgtatgcaaaacctttcacaattatcggatgatctgagccattcgaagcataagtttctcctatcgagcaactgcttatatattagcgtaggttcaatagcaagctgaacatcggcttcttactagcttctgttgattcaaatcgacactaacgctaatcgacttggacagatagacaagacctctcggtgccaatttgaagtcatgcttctccttcatctccttcaacgtgatgggcagccggagctcacggacagtaaccatttcgtaagcgaaatcgtagccatcccagtctttgtgcttattgttgaattcggcattacccagcccgttttcttccagtggagcatcaccggcattccgcgtccgggcgaaccgtgtttcgcagacatgggtgatgctggagtgcggagcagtccgataaaaccagattcgtttcacactgggtctgaggcaatattttcgaaactcgtagttctttcttccgtcggcgatttgagtcatgtaggggtcctgcatcggtaggatgacatcgctgtgagaagggcatctgaccccagtctttgcgcgggacatgagggaactgttctgcgaacgtatgggcaaaaataagagggagattgcaggatctcagatcgagatatggagtgaagcataaaagttcacagtctacatatttatctggagtcgtacaagggatctgtatgcgcctttcccattatcgagggtcatgggacttagcatcggctggtggcaggaatcttggcagattagcaacaggttgaagtgactttcaggcacctgctaccgactagaagccttggttgtgcagactgcatcgtcatctatcgatttatctttcttaatctcacaaatagatttgcatagcaaaatgagatggatgtattctatgatgcaagaaaattcgtgattgatcgtcaaatgcctcggaatgtggaggcggtgatagcggtcaggtaatatccaatgagagagttatgccccggtcatctcctgcaagtggtcaccacatatccctgaaatggccaagcagcgcttgtcagacattctagccgccgccgatgtggatttgaacccttatgaagctctttacaagcatttccatacgcatcccgagctctcgctacaagagaaggccacatctgaaaggatcgcctcccatttgtgccaactcggatcctatgaggtccagacaaatataggaggttacgggctcgtagggactctcaagaatggccctggaaaggcaatccttcttcgggccgacatggacgcgcttcccgtcaaggaactcaccggcctcccctacgcgagctcagtgactatggctgatgcggacggcaatgaaaaacccgtaatgcacgcttgtggccatgatatgcacattacatgtctgcttgccgcagctgaagtcctggcccgtacacggaatgcgtggagcgggactttaatcgtactcttccaaccgaacgaggagcgcggcggaggcgcccaggctatggttgatgatggactttattcgaagattcccatgcctgattacgtcttcgggcagcacgtcatgcgaatgcgagcgggaagtgttggttcccggcctggcacgatcatggctgctgccgatagcctgaagatcactctctatggccgcggtggtcatggatcacagccgcatcagacggtagaccccgtactccttgctgcgcatgttgttgttaggcttcagggcattgtgagtagagaagtggacgcgaatgatcttgctgtcgtgacggtcgggagcctgcaggcagggcaaacagaaaatatcattgcggaccgggcggaaatcggaattgatttcaggactgtcaaattggagactcgagagaaaatacttgctgctatcaggcgcatcgttgaggctgagtgtgttgctagtggatcgccgaagccgccgttgttcacaccaacgaggcggttcccgcccaccgacaacgataaacatgtggcctctcaactggctgcctcttttgcagaccatttcgaagactttgacggcgataccccaaggaccaatgttagtgaggacttctccacgttaggtacttctcaggggcttccttgctctttttggttcattggaggaattgacccagggctctgggataagggtcagaaaaacgaaattcccatggaagagatccctgggaatcattcggcgttgtttgccccagtgatccagccaacgatgaaaactggggtggatgcgttgtgcatcgcggctttgacattcttgaaaaagtagccgtggctctccgggcctccctcgacgggttggaaacgtttagcactgcatgtaatgaattgcttgcagatttgattgggaattctcggttctatattgcagtgctaattgttgcacaggtatggcctttttgcatagtgtttattttattcctctgcaatttcactctattcattcccaatccacaagttgtggaagaaaacctctttatttttgatttctcgtccctcacatcaattttcaaagccagccaagaaagacaccacagcagaggcaaaggccttagaatcatcatcagttcccttacgagcatccccaatctgctccaagaacaacgccaatttcgactcatcccatcccaggatcggcgcagattccaagcacatattggtcaggccaaagggatccatttcgtaatgaccctgcacagagagtaccctgcctgggtggtacagtccctgaatagggcagattggagtgcttccaatattaatccacggcgcgggcagcgaaaccggcggcgactcggcaagcgtaacaacagttcccttcgcaaccgccatcacccgatctccatggaacatctgaatacgcaaccgttccttaggaagagcaccgagtgcgcccgggaacaacttcacaaaggcgtgttccaattgaacggtggtaagtccgacctcacggccgaaagggcatttctcaacccagacgtcgtggactgggtcatcaacgttgcggacgagagcgtgcgagatgagctggtggccgaaacaggtgccgaggatgcggacttcggggtattggttgtagactgtcttgatgaatttctcgagcacttgcatccacggtgactggtccatttcgcctacgccgggcgttccgccggtgatcaagactgcgtccactgggtatcgtacgggtatatgatccttgtcttcatggccgcggagagtgtataggtcgggataatggcctcctcggatatcaaacggggtgatcttgacttcgagttgctctttctcggggagcagggtttcgttcaggtgtgttgcagtctcgcagaggatggttcggaagtgggcgctcaagagtcctcgagcctcgtatagtttgcgggctggtatgtcgacgtctaggacggcgatatggatgaggtgaaccattttttcaaaatgtgtgtttaattgatggagggaaaaggtgaaatggagatttcgcacttgggcgtactactacataatataattttcccatactgactccgacgcagaattagacaacatttaggtaagacatagctttgtgggatatagtaatctatacaatataaggaacaaacgacacccagttactccaacagactccaaccactaccgaagtattaggtaaaagctaacatcgtcactcaagatgaccttattttttttcttgatccacaatctctacattaattctaccgaaaataacccgggtcttttctgttgaactttgtacagtctgtcccgcgtacaggatgataatgtgtgataaatcttggatttccacgtgtctcgattgaaactgacagatttgctatgctctgatatactctatctcatttctgatgtcttccacatgtgtatatgaaatatgccgagccgaatcggccggttacgagcttataaaggcttggctttccttgccgctttttgccgagactcggaagcctccgagtcttacataatcattagcatccccactcacagaacagcagccaagtcagcaaatcaccttgactataaaagggatactgtttgaattatagcaccggacccaagtttgaaattggacctatacatgtaccttgtggactaaatcctgtccgagttcaacggagtaaccttggaagcccggagttcccagaagagcggtgaggatagtaggcagaactatattcagttaggagggtgcacctgggatttcaggaaggttacgtatacctccaaaataccatgttattgctatttacaactctttataattatcaatacttgtgtcctaactcactatacatggctagccaagttgtcacatagtataatttgttcgaactctgctgcaattgattattatttgttcaagcctatcaccgcactaggaagataatagtatgcaaaattacagggacaagtaatagtgttgccgagcaatcgatatatagattaatcagaatcggagctatttcttggatcgctaaattacaggtagaatttcaaattaggaagacatatcaatcatcttgtcagccgtttcgagcaaagtgtcggccatgacatccatcttagtatcaaagatgtcaatgcacgactccttttcatagatcgagcagtaagcaccacggaagctgattattcgagacaagttagccggatatcttcctcattcggagcaacagcaaaacttacccagctttaacagccgcgctcacatcccacatatgcgccgccacgaaccacttatcatcctcaggctcaaacttatccagcataggctggtaggatcccatcgagggtttgaccatatcaagcggggactccctctcagattcatacttcatgaactgatggcaactgacgaggttctcggcgggcatttcaaagccggcgcgcttgaagtagccaccgactctttctgtgtcgcccgtggtcaagcaccagatggtgaaaccgttcttcctcaatttctccatcatggcgcggcagtctgggcgtagttccagcttcgaataggcatcctgacatatgtccctttcctcgtcggtcgcgaaggatctcggattttggataccggacagatataagacacggtagaagagcgccttgaagactttcttgtatggaacgcatcgcttggacatctgaagcatcagagactcgagctcggcggcttgcatccaggcatatcctaaggcattggccgacaattggtttgctcgcagtcgtgggccgaggatgtcttcgatggtgtcgataaagaagtcgaatgacacgcaagtgccgacgacatcaaagacggcatgcttcctgggggagactgtgttgggggaaatcatgttgtgtatacaagatgttgactgatgattgaatgaaattgaattggcagacggaagggattcttgggatacatattgcccctggccttctcatggtcatttatttcaatgcccttcgccaactccactggcaaccatggttcaatcattgtctgactccggcacaccgctatccgataatctagataagatcgaggtctactccgtgatgcgtagacagtggcggtgtgggtattccactccggggctaacgatatctggtaatcagctgtcaccggaccaggcccactccgtatccgaactccgtcaggcgattgcattgtttttgagattcaccggagtctctgccgagaaccgagatcgaaggaaagggggagcatctggggtatcaaatctgaccaagtcgatgttgcaacgaaaggtgggcgaagtagaaactaatgcgactttgcctgggatctttcagctataatttaaagagtcttggtagtttgatatgaaagagctgatatatatattacacagtttgaacagaaaggctggtggttcggggtaaagcgagcatatggcattaggaatacacttattctcatacttggagcagtctcaatatatacaatagattactattcataaactcaacacatagaatctctgggatacatcgaattcattgttacaaaatatctctcaaagtcaggtagatttgaagacccgaagactaagctaagatatcatactaatccacgctcagtcccataaaatgttcagcttgcgaaggcctttctttggttgtggcagcggctctgggttgcgattggcaatatcaataaacggttgaatgggtatatcttccagggggatgatctttgtcttgtgaatcaacttgtacgcaaaataaaagatgaagaagagaggaatattgatataagaggagacgaatccttcgtcgctccattgccctttgataaaagtcgagtacccgccggtgatgagcaggagactgagcatgatcaacgaggcccaactgatatatggctggagcggcgtcgcccacggtagagacttgcgagagattccttgtttcttgcagccgtaataaaagcgaagatacgtgaccaggatagtgagccagttggtcagagttgtgatggagacaaggtcttgcagccaatcaaacacggtgttggcagttgaggagagcgacatgtatgccaggcacatgaacagaccgtagagcgaaattgcgacccagggaaccgagaatctgttaagtcgagtgaagaacttgggggctttaccgtttaccgccagcccgtacaatactctcgaccctccgagcatgttcgagttgcctgaagaccacgccgacgtgatgatgacagcgttgatgattgatggcaccaccttgattccggctagggtagctgcgatcacaaagggagactcggaagctgtgccactagaactgctgagtctaggttcattggaggggaccacaaggccgaccatgaagattgagatgactaaagggaagacgtcagatttgaaggattttctatcttttagaatcaacataccatagaaaatcaatatacgaaagaaaatccgcttagccgcctgcgggatagcatgcctcggcgattttgtctctccagcggcaacggtaattgtttcaatccccgaataggcataaagagcactattcatagatgtccaaacaccgagaaagcgaccaagagagccaccgatgccaaggtactgaacgaaaggcccagggtggcgccagtattcaaacccgatggttttatggtcaggaccgccaccacaggtaataacaagagcctggttaatccttgttagcaccaaagccggtcaattcagtggcagaaacttgagcttaccattagattgactccaatgatcagcaagatcttcatcaaggagaaaccgaactcgagctccccgtatactctcacaaaggccatagaggtacacagcatgaccactccaaagatactgatccaaatcgcgctattgaggtcagaccagaactgcacgagcacagcagcggccacaatctctgcagggatagacacaaggtaggaatataccacgttgtagccgttggcaaacgataatgccgggtcaacaaagtattcggcgtagcggactattccaccgttcaaaggaacaagtgtgcccatctcgcccgtcgcaagggttacagttccagcagcacagcccatgaccaagtatcctagaaaggcacccaggggaccagaacgtgagattgctcgaccagaactgaggaagagacctgttccaatggtaccggccaaagcaatcatttggatgtgtctctgatgaaggccttgcttcaaggccgaaatctcttcgaagtctccgacatattcatcttctggttgaacaggcgactctgggtcgtgtatcatggtcttgacgtctttgtcgaattcatcgacagcgtcggtggaatgatcgttgtgaaaggtcttgattgtggacatcgcgattgacttgtattttctcttcttgtaaaaaaaagaatgtcggcaatattgggccgtccttgctatatggcgcagacctatgtccggggatgattagcctcgacttatagttcccttattagtggccagatggctctgaagtcaccgtgctaagcgacacattctttatctgtacacttaactatgcggataacatgatattgaaattgacgtcgagggtggccttccaaaagcagttagagggatgacatggagaccttgattggaagatacaaggttgccagggcccaatcagcaggtttgagtatctttgagacaaacgttgactgagggatgtgagatagcagcgcacgggtgatagatggggtgacgatcaactccgcagaactggaaggccgtaaaacccactccgtgagatagtaggaagctccgagagataagataactatcgtggcatgacttagaatagcggctcggagtaccaaataacgagtacgtacggagtaatcagaaaacgttgagccagatagacgtgctgggtgtttaactaatatgtcatttttcattcgtctggtgttacaatgctatagagtacatagattgaggattaaaggaactttttgcaggtcatcactgttatatctcgaagaatggagcctttgtttgtataggttgtacaagactagataatgataagaacagtcaagctgcataactctctcaatgtgcaatatgcaataaatatatctcaacgcttgatgccgaggacatcacccccgacaggaccgttcctcgccttctcaagcctctcctttgtcgactcaaacaatctggggataccagtatcttcaaacttgatcccattctgaaccatcttagcaaccccaagggcagacaagaacacctgaggcattccatgaccattgaagcctgcgagtacaaactggctatcctctccaggcacggtgccgacatgggggtgggaatcccagctgtagcccatgatcccggtccaaactttatccactttggccccgctgttttcccagccattgaaaaaccgctgcataaaaccatcgtaatggtctttgacctcctcgatgaggattgaatcgtccacgctgttgtaccatgaactcagaacagggtagtaaagcaagttggcgccaccgacaacaatgctgccgtcggcgcgagggatgagatatgaaacaacgttgtcttcttcgcggactatgtaggagttattcagcagaggcgctttcgtgccctcgggaactgaaatatgagtacactgtcctttgcagggaacgatggcttcgcggtactggggaagaagacccgcgatgtaggcattgttcgcatacacgactttccgagcgacggtcgtgcctcgtggagttgtaataataaagctgcctgaagattgccgactcacagacgtcaccggggtattagtctggagattgaccaagccagtcttgaggattgaggcggtcagatgcataattaatttgtacggccacagacttgcggctgtgaaagaagcagatgctttggcacctttgacacccgaaataccctccgcattcttgccagacacaaagaagacatctttcatgtaattcagatcacgggataccagcgcgtcatacatctgttcggccttccgggcagtttcctcgttggtccacacatcgatagaccttgtgagggtaaagtcacagtcgattttctccttttcaaccaaggactttatggcgtgtatatgtgcgatttcgaactccgttacctccagcgcgcgttcaactcctgctcggtcgatgagcctggccatgggggtgtacatgtcaggccgtaggtgaccaccgttgcgtcctgtcgcacccgaacagacaccccgtgcttccaggattgtgacagagagtttgttgtcactggcctctcctttgaccaagtggtacgctgtactgattcctgcatagccggcgcctatgatgacgacgtcactcgatactggaagctcctctgtggtccgatggtcgtgcagttcgtgaatgtctcggtgccaaaatggcacagttgcattttcgacgggttgccgggatgcattagatgagtcggttggagacatagtcatcggagtagaattgattgttgctgtttgatttggactcggaggacttgcgcaggttgatgagtaggctagtcgatgacctgctttgtcggcattaaataatggccggagtatcaggttgtttgatcattcgatgaggacactttagcaaatacaccgaatgaagataacgaactccgattcgtcggtattcaataatgactgatcaacgccgtgtctgcccttatcaacccccgcaaaccccgtgtcgggcccggcgtagtccactccgaaaggccaaaaagaactccgaaagctgacccaggggttatcttatcagtttgcccctttgacaaagcatagtcaaaggctttaatgtagtcaacaccgatggcccggaaatgtcggtccgttgacagtgctcaatacggaaaaggtggattaccttggtcaagccaaccaccctgagtccagtcaacagtgttcagccaatccatatcatggaatttgttcatctctgggtcaatatcctgctctctgcctatcgccataggtagattttgccctggagaccgctcatcttgcgggccatattgtctcagggactgctgttcgcctggcaactcttgtgcttgcatgccacacgatgaccccaaagaatcaaacacagcgtcgatgattctttgtataactgtcttgaacttcttgctaagctgcgcattattatccgtgggacgtatccagtcaagtaacgctctgaacataaccagaatctggaccacttccgaccgcgagaatttaacacagttgctagcggcggacgtcgatgtgagctcgttttgtggcgaagatggggctagattacttgctcggagaagctcgacgcatagaattcccgcacagggcattgcgtatgatactgcctggatggattcagttagtataatattctcaattcagaacggctaggttcgtcaaagacttacaatccagtcaaaggcatggtggaattcctggagttgatcgcgcttaagccaaagagacaggataacagacattgtctcttgggcgatgtcaaacaagtcttggccaccgctgaattgccgcgatacaagtaggcgctggaggaggaactggcattgcaatacgtcgagttgtatgcgggtgataatatagacttcatgggcgcttcgttcatggcattgtgagcttgactggggccattcggagtttctccgatactgaatgtgcggaggatatgaagcaactatcttccccaactgaacttgtaggtttctacaagaaggtcggagtcagcgaaatgtacctagtatgcaatattgcttctaataacgcactctacctgcgatttggtaaattccgaattgacactaagggttagttccaagattccttcccggataggactaagcatggccagtgctcgaagccaggttgttgtgaatatctggccatttgtgttccagccattcgagtcaagctttgcaatagccagggccaatctttctcggtccccatatacatcttcctcgcttaaatcgagtgggagagggcattggcagtaacgattactgagcataggtggtcgcgcattgaatagactgtggcatttgtcgtggtaatacatcgacgcagcgagtgacgctcggtgttgagagaacggggtgatttcctttgcaggagtgaggcggtggaatcctgcgcttataaaagcaccgcggacagtcccgtagtcgactcgtacacggtcacctatcccgagatgagctctattctatactgccagaattcgtcctgatgtttgcgactcactctcgtcgctgatgatgatgctttgtagtctggtgctattcttcatgcaaataaccatggtatcactgatttcaaaattcccttcacaaagccttatacaggccgcagcacattctctcatcttgtctgcggcggtgtttcgattccgtccatactgttcgggtagatcaaatactggatcccactcttgcttgcatctgaaagcaattccagcccagctgaagaggatcccaatcatttcccatcgcaaatgaggcccaccaaaccagttcatccaggaaggatggtcggaattgcctgcgtgatcacattcaggtgtcgactgagaccttttgtgattgagaaatagatcatttgccactctcaatactgattcacgtgtccggagctcacccagcgcacttgcatattctgtccatacttgttttaaacaccgctgaatcattgtgggcgacagccatacatcgtagatatgatgaattccggccatcagcatgtcacatgtacgagcagtggggaagttaagtagtgttctgaccgccagttccacacgggacctggccgttgaatcaggctctcggcctagctcgcggtggctggaatttgtggcatcgaacatcactgcgccaaaactatcttgattttcaacaaaaacagccgagaagcgggtcgtctcgtgttggcccagctcctcttgaaatagcatgttccgttttgatgcggtggaacgggctgttagccccgagctcgcggcggggctgggatctgcaggagagagtgagatcgctgccgcgaccgaggattcagtaggaatctggaaagcgctagagacattttgagtggtcagtaagtcggcgggcagtgttgtatcgaagtgtatgggggtgtgagaagtcggagggcgacgtttggtcataggagcagggtgataaatgcaattcaaactgcgtaggacacatcgcgaacacttcggacttgcatggtcacagcgaatcttagccttgcgacatggttcacaggcttgcggttggccattatggcgttttcttggttctgcgagcatcatcaagtgtagttccccttaatatttcccagctcggtcatccatgcaaataccagacatgtctagaggataataagaaaacgaagtatggtcgtagaggagattaccagccccaaggccggtggattaagttcggctctatcgcgataggggggatattcacttgatgtcagccaaccagctgcccaggacgagattatccagattgcgtaataatacggtcattattgtatcaaataccgctttattttgcgtcgatcacgatcaagtgtctgtaagtttggtaacacactgtacggaccggtgaactagatgttctgagcacggtttcttcataaatagtggagtcggatttgtccggggtgcatgaaagcctcagatgaagagacagtgggcagtgaaggatattcagagtatggtgtctcgttgggaagagtctggtctgttgtgataaacagagtagacagatacagacgagctgatctatcagattccgcttattaaattccgctcatccctctatggccatatgcaaagggaagattctgtagcatcggcggacccgagatatccgaatacgattgattagccgaatagggaaaagcccgacacttttcttgggaagggcttcacgttgaacgagtctaactaacttggcctccttggagattatatcatcattgacgtatctcctagctccctctgtttcccaccacatcttcacctccaaattccacaacatgacccgttcaatacccctgaacggggccaaccaaatcccaatgaaagaagatacccttagacgccggaatatcaatggctcgcaagtcgagacagttggaaacggccataccagcccatcaaagtcagccccgaagccccaaaagccgccctcccttctccgtcgcagcagggagttcgcgggtaagcacacatggacattcccattagcgctcatgctagccatcctctcggtatatgcgctccatccgaccgagtcgaatccaatttctcatttcatattcctatcttacaaagagccatccctggatggcgaccggaacgccccggcgcagtatggcaagggtctgtgggacatagcgttcgtgtcattctacgtcatcgtgctatccttcacgcgcgaattcatcatgcaggaaatccttcgccccttcgccgccgcgcacatcaagtcgcggggaaaacagacccgcttcatggagcaggtgtacaccgcgatatacttcggagtactgggtcccgtggggttgtatgtcatgcgccagacgccggtgtggtacttcaacacgcgcggcatgtacgagctcttcccgcacaggacccatgcggcggagttcaaggcgtactacttgttcgaagcggcgtattgggcgcagcaggcggttgttatgttgctggggatggagaagcggcgcaaggacttcatggagcttgttgcgcatcacattgtcacactggctcttattgccctcagctatcgctttcactttacgtatatgggcattgctgtttatatcacacatgatattagtgatttcttcctcgccgtaagtcgcattcaattcttctggtttccgacaacccgaatattgacaatctcccaggtttcgaaatccctccattacatagccccggacataatggtgcccttctacgcaacctccgtcggcagctggatatatctccgccatgtactaaatctccggatcctttattcccttctaaacgagttccaaaccgtcggcccctacgagctcaactgggagactcaacagtacaagtgctggatctccaacatcatcaccttcgcactgctggctgtgcttcaggcgctgaatctgttctggttgtactgcctgctgcgcagcgccttcaagttcctcctgacgggggagaagaaggacgatcgctccgagccagatgagtctgagattgagcaggaatacaaggttggtggggaaatcaatggccatgctttgaatggcagtgcattgcccaatggcaagcctcagtgtgccgctgatggcgttgatatctctgtcaaggcgccctaacgatgctcgtgtggctttttggtccttcctgtgggtgctcacactgaggagccacatattcatccttctcttaccttgcattgcctttgctgttcaacgattttgaacaaaagtatttgctcaatctaatccatcatgttgccatgtatcatggcgattcgattttctcttctctgtctgaccgttgctgttgcgatgtctcacttcgtacgattagatgtgccatacgatatatgataataataatttagacttgaactagggtttgatcatcgctggtcacatagacaatcattccaaggggtggtctgcaaattgcagaaattatatacgcaatcaaggctatgcccgcacctcattgctcgcgccgtatgggcaaaacagtttaaacagctaacaaaactccaaggctatgtgcgaaagtgtggatctacaaaatgagatatgaacagttttgtatcacagcataatcaagaaaaacgcaggcccttgctaggatcccaggttcccgtttgaggggcacgagtgggctgagtcggggctggtccagctcctgtgcttggagtggcattcggagggttagcggcagatccgaatcgaatccccatttcgggggaccacatccccggcatacctcctggcatgctcggcgtagaaaccggaggcggggctacaggcgcgcgcactggttggggtgccgtgagagggggtgctgtctcagctgggcgtacggtgtgaacgggtgggggtagttgtgatggcacatggatgggctgcgcagctgagtaggcggagggagagtgatgggtccgaggtgactcctgaggttgttggcgcaggtgtggctgagaaatatgcagtgaggccatcgctgcggtattggagatgtctctggttcggggaaatgtaacgtcagtgataatccgtcttagtaatgggtgggtaacacatacgtttccagctggcttgcctccatccgacgttgatggacaaaaacctttgcatcgtcgcggaatcgggctacaatctttgccagatcattgtaaaacttgcgcccgacgtcgaggttggaaatgatctccttatacttcagatatccattttccagatcctgcagtgccgcttctcgttcctttgtcgacgcatcacccttatgagacccagtaaatgtccggttagcttctcggacttggtccgaaagttgatcttgctctcttcgctcttgggctagcatctcacggtccgaatcgtatagcttcagatgctcctcgaacaaatcctcgaactggcttgcttggataggctgcatggggaattcccgctctagtcgagctgtctgtctcaaaagtgccgggtctaaatgcgatccattagtccagttcaagattaatggaaaagaaaatacgtacgaatatcatccgcgcgacctttgtccttcaaagcttgaattcgccgcctcctccgattctccattcgagtgacctcgctcaagcaaccgcgcaaccggttagcctcgcgctcaacctctggtggaatgacaaccctccggctactaggcacaaaggattccaagtcccgatttgtaccagtgagaacgagaaagacagatcgtgaatctcgcagcttgcgctgcacgaggtcatcactgccctgggcggatgtgaaatagccgtcaatttcggtcaaactcctgtagagcttaggcgcggcggattccgaggttccgcgggtccagcgatcggtgccgtatttatggcgagccgcaaggtcctctgccttttcagcagctagaagctcaacaccttcattatacacagccaaatcattgcctttgactctggcggtgtcgtcgatagaccggtgcaagcgattcaggccatcttgctggcgcatttcctctgcgtgcgacacaagcgttggcgggagacctaatggtttttcgagcgcttgtaatgaccctggcaaattgagcgatgaaagcaagcttgaacctgatgttagcagaatttcccttgggtgtggtatttccattgaatacatactctcgcaacttgtcggacatagactccagctctccaatgagagtatcattgaccagtcggtctcgacgatcagtgtagatactggcggcaatgtgaactgcatatgggaccaattttgagaacagcggctgccccaacggaccattatcaccaagcatagagatcgcatcggtaacctgcgaaggtgccttggcgagaaccatgctggcacgttcaatagtcttgagctcagacttgggcggcacagggttgatgtaaatgatatcgttatccttctcggcacgcttgaggtcttccacgacacggctcttcaagccattcaagtcacccaatacagtccgattaatccaccgctgctctttcaacccttcaccgacacagaccaaacaatcgcgcagccgagcaacctcttctccatatttgcgcttctccaggcagtcaagcgcctgtcggaactgagcagcagcagcaaagtggtggtgctttgcagtcatgtggtggatccagtccgtgctaattgcattagacttcacagccaagtcacctgcatccccgtagaagtcagacaccttggctgccagtttcgcaatagatacatccttcagtccatctttaacagctttctgccagaagcattcctggccctgtccgagcaaaagaagttccaaactctgcagggtcacctcatccatatcctctggcggcgacgttcgaaggtctgggatgatatcggttcgaaggtggctcaacactccggcggcggagcagaggtagttacacgcctgtttgagtccatctgcggtagtccggttggtcgcatatgcaagctgggagtataatgcggcaagattgaatatgatattcgctagttcgaagcgcaggttattttgtgagactagaagccatgatgtatttctattaatctcgtgaccaccaaatcggacctcaatccaaaaaaaaagaactcacctggtcgcgaaacattaaagccaaaagccggataccacgaaaaatccactccgacctaaatatcacgccgaccgtcagcttcgaataccaaaatccaagagccaggactagaaaaaatgcgcacatcaactgggaacttcccacccagccatttcagctgagccgcatatgtgaccaggcgactgatgccactgtaatgcggttcctgaacattgatggcttcagttcgtagacgatcaatgatcatcagatcctccgcaaacatatccgggcgttggtcatatttggtcgatatgtattgggtgatcgctgcggaaagcgagacgggatgggaacgccgaaacgggagctggagaatattactgtaggaatagaacagaagaaccagtcagtgtcattcctctcttctcgcactcgctcatatgctgctgggggtactcacgacgccattgtcgctcgaggcggggtttggaagagtccgtttgttttgactgcgggaagttcaaccccaccgggcaacggaatgacgcttcgtggcctgaggcatcaactcaatacttggcctggttaaaagctgtcttcgacacttaagtcttacccctcccatttagcgcttgctgaatgtaaggaattgactcgtcttagtatggactaaaactattgcgcattccgtttccgtcaggcaatgaattaaggagacctacacctatgactcctcgctgagaataggccacgaccaacgcgcccattattgttcctcgggcttcagtgttgatctacctaagtagactcaaaagctgtttctttccaggacaaaaaggattgaacaatatattcttgaccctttacctgaggcactatttccaacgcctgtcattcatcatatgttctcagaatggcgacaccaatgcctcgattcttgaccatgtcgcaaatccgaagccttcatcgcagatttggagtcccccatgcccccctcacccagatagctatgctggaatctgcagtcaatgcgccggtgaataagaaccactatgagaaggatcgcgatgtgtttcggctggcagcgatcctggccgaacggatcatgcagaaccacgcgtttcaggatgggaacaaacgcactgccctgctagcggctgatattttcttgagggttaatggctattccctccagaggtttccatctgcagatgatgcgcacatcgagggcctcgcagccgcgcatgttgcagtcgtcactaagaaatggaccgttgaacagctgtgcaactactaccagtctgtcgcgctgtctttaacctagttcatactgaggttagacagtactacgctgcccgccgaatagcgtgctgaagataatatcccctctagttctatgccacttggcagcacttggctgactcgatcggcaaatccgggccccagctgtctatgtatcagtgctagactgccgaagcagaaactgaatttgtaccattgttagtcctatttatcacaactcatacatatttccgcttaggacggtagtcgtagggctcgtattagactccgactagcggggaaattaggttaggatatggagacgaggataactcggcgactccggaatacaacacattcttggccaacgtataatgcacctatatatggaagagtcccaccgaagccaaaatcctacgtgtcgtgggagaaaaagcagtctagatcggtcttatcccgacaccgtatagctcacgagtcacgcacaggttctttaacaggtgggaaaactaatatataggcttgcccgggtttcccgatagccacagaaaccttcttagataccaagtcacctttcatatcttaggtgataaaatccgcagtagtcttctaaattcgagaaccttgtgtcccaaagtaccaggaaaggagcgagcaacattgctattcatgagcaatctttccatcgtatctataagataggcacataggataccaagacccaaataggacaccgatttagggttttttcctacttggcttagaggtgggggatggtcaggggctgatctctacaataatcacatattctttgccatctcggcctcagccaaacgcggctagtgtggctacagcctctcaacctcctaggatattccctcgtataccgctgagtcatatacctttaaggcgtaaaattcagacatctgcatttggagccagacagatcatgatgataagatgttagacaaacagggggtccgtgtcagacatagccagccatggctaggcgggacatggggtgcagcaccatcgcaagaactattaattgctacgctatgccattttgggatcatcattaggctttgttgggcagtactattgagatcgatcacatatactttacaaggttggttagtagacctccctagcttttaatagccgctttccccctctccaatagagctatcgtgtcgccctccatcctatatccaactttattcaactccgctactctactctattccgacctacaacctggtgcaaagcgttcctgttgtgacaacactgccatgacggcacgacatcgtatgttaccctgctaagtagcttgagaatgcatctgactcactatatactagcgtatcgccgcctggaagtgcctgatggagtaccattcgagctgaaaccctcgccaggcaaaggatggggtgcttttgccacaagacgcattgaccgaggatctctcatccttagcgaaaagccaaccttcgttatctggaggtctcacagagaaatcacggattatcatgttaatatggcgattcaacaactgttgcctagtcagagagtacaattttcactccttcgcaacaatgggtcaagttggtttacaagtatgaacgaagctttcgctgagaactcgttcaacatcggaagttcagaccgcaatagggccgaagctcatggccttttccctcttcactcgcgcttcaaccactcttgtataccgaactcgaaaattccaacggttaatggcgaggtcatttcaagctttgcgaccagagacatagaagctggcgaggagatcaatttctgttataataccgatttcgaaggaaagactagatatgagcgtcatcaagccttacgttttacctgcgattgtttggcatgtcggcctggcactcccttccaagaacttagtgacatgcgacggcgattgatccgagggcttcaataccttacgcgtggcgtggacttggatgggcaggctgagggtttgcatcctattattgtcgactcgacattgaagtttgtcgcagagactttcagcatacctctttcctctagattgatttatactcttctgacaattttctttctcgaagaagagggattgctagatgattttatggacgcaaggttaagaccgacattaatcaaaacggcgcaattgttcaagtctgaaagcaataaatgcattgtcaggctagctatggaacagaaaacctgggtaaagaaattgcaagtggcattcacactatatggccgagaagatgctgccgattatgaagttgccctagcgctacgccgattgcgcccgttgttttaatggtttccctttctttcatatttcaaatgttgataattcattgtgctatttgataaaaaagagctttaagctcatccatgtatgtgtgtggataataaatacgagaaaagacctcgggatgcagagtaagacgaaaatccagatgttcaacgcaaagaaaatgttcaaaaaaaggactgccatttcatcctagtatgattgcagccttgccaacggttgagtttaatttggcagctcgtcaatgcgcattctgatgtattcgaaaatgctgagcaggatcatgttgttgacgccggtccggataagaatgatggacaggcccttgtacatgccggatttggcaacagcttgtgaggcctcaccaatctcactggcttttcccagcagaacactctgtgcgcgagtcttgcgcgtatccagaggataagtctatgagtcacattagtgcatgtcccaaaacagggtatcggcctgatcacatacgcagaaccagggcacggtgctgcaaatggcaccggcaatcataggtgccccgaaggggtttttgtcttggcccaactccttggctgcgagttgcttcacagtctcataaacaccaaagtagagtcctgagcccacggtgtcgcgtaacgcatgcaggcggaaaccggtgtaaaggccccaaattccatatcgtccatagatcttcttgatggcttgaacggtacccaagcgaggcttgtcacgcagagatcggtctcggactgcgtccggggcagccatggcgcggtgagacactagaactgaagtttgaacgacattcttcgccaactcgaaggggcctattttaatgtaagcgcggctcctctcactcttccatgtatcaatctaaacatacaggcaataggcgatgcgaccaagccagcgatgaggcctgcagtggtgaaagtaagaacacccgtcacggtggggaggcttccaggcttgttgtagttatccaaagggttagaaccagttacgcgttcgacgttatcagcgatgatgtccttgaaggcattgtatacggtaaagttgacgacgcggactaccgtgacacttgccaagggtggaagggcgcctatgtgatggtcagtcgatccttcagctaccgacttagataccgacttaccagcgacatatccccgaggcccttcagtgacccagagatagcggacacactgccatatgttcttgaaattgtgtctttcaaactaatcagcatattaatcccatctctaaggtcatatcgaatactcacgtctgcatccgagtcttgacgttctctagaggagtctgcccatcggagaaggattagcatcattcgcatctcatattagtcgcaaataaggattggagtgtaaaacaaaagctcgccgaatgagacactcaccaccgacaatgtagcgcaaatagtcgacacccccgatgcgacctgggttttgtacttcttgaggagtctgttgcgtgtggcctcatccatgttccaagctctgtgatcaggcatgatggcggttcttgtgtggtgagttgatgaaaatatggtacatgttcagaactgtttagttaccccgaaactttctccattggcagcgcggcgccgagaaatagctataacaatggttctccgtggaaaagcgttttagtttgcacagactctgatgctttcaggctggggaacccgatggaacgcaaagcggcctctcagaactagagtagaccgttcagcgtcccacagttgaccattaaacagctcgaccaacccagtgctatcttcagtctgttgaagagtaccccagcaggttttcacagtataaattggtgcgtttagatccgatttccagattatgagatagattcgatattagtggccggtacaatgacggccacggcaatgggtgcaaccccgcgttcacgcgttcacagatggaatcgaggtatggtgcagaattgagcggttcaagtgatgttctaagagagtcccctgtctcagccagtcgggatattcttgcgcaaggtgtatcgtctatagcaatgggttactaacagtgatcgcgagctatgagaagacgatcattagcatcaatttgctttccccatgtttctcgatggtaggacagaacggattgtgagtattcattttcaagaggacaacttacagacgatattcccctattccaccagacaaactgtgacctcaatactatgtgaagaaaagaagagggaattgctgcaaaatggcatgtggaccgagcttagctcaggcgctcaaaggggtttagggccaaacagagtgacgtcgttgtgaacagaacaggacttcttctgtgaatactggcattgtttgaacattcgcattgtttaattgactacttcgtactttgtatgtatatccatgcagagatcatgatcatattttatcttatttccagcctcggcaccgccgagggacatttaccggtcgcggtctgatcatcacttctttatatttcgtgtagagataggtagagacaagcatgatactttacgatgtatggagtacttaaagcggggagatcatcgcaggttagaccatggatcatggtaatcagtgcaatatatgtggaggacggtactccgtgacgagctcggggccccacgcagggattagggtcatgaccacccattaatcgcatcagtcgaaaccatggaattattgtaacccagattacagcctcaaatacaaacattgccgtggttgggtgatgctgcagatcattgagcaacacttcattgcctcccttgctagggctagaaggattagctggaatgtggctcatagaacgtccatatgtagtagtcaaaatatcaactgatcgattgcatgattgtcgacgcctggctcaaactgtgctaccagaatcaactagattagaattgaagagatgaattgtaatagtaaccttgtgattgtctcgtacgtcccggtctcttttcacatgagatctctactcctcgtctgaatagattcctacttatagcttaatttggaggttattatacttaaaattgtcaaccaagttccaaagagtattgaggtaatcgagtcacctcaggcaatatatagtcacaatgcaaaagtttccgttaatctgctcaaatatatatatcgactacctcggccctttctagtcgattgaatcataatattcggccacttatgcgaccttgtcatgtcattttggtagtcttcctagacgtcttctttatagaccccttctcacctttttaaagtttcctaggtagactacaattttacggaaacatttgcagtagcactgtatatccatgcagtataagcttattttacattcggccgatctccgtcatagagatgggatgataaccgggattgaatattgacctcatgtacacacatggtacgggatgcatacttgaatgttccaaggttgttagtactagccttgaattgcttaaagatggtatagaatacctctgcaatccaatgagcagagattgtaacgatatgttgtgtcactgttgccggaagaatcgaaccacagcgtcaaatgacttgtgtgtatccttcaccctaccatgggatgatcggtggcggagtactttgccggcatgaatcaggcaccaatagctgaaaatcaggcatccaaccctcttcggttcctcgggacctcggtccttccccgcaattttatgttgagctctccacatatcccgccgattcttatttatgaggcctcgcttctcgagtcgaacctataccaactccacctaaatttatctctgataaatcaacccacatatacaccatgggcaagaagcaaggaacccccgcttatgtactgggcgttggcatgaccaagttcatcaagccacgcggtaaggtcgactaccatgagctcggctatgaggctggtattaaagccatgctcgacgccaagatcaactatgacgatgttgaccagggcattgcatgctacgtctacggcgacagcacctgcggccagcgcgtcttctaccagttcggccagaccagcatccctatctacaacgtcaacaacaactgttcgaccggctcgactggcctcgccatggcccgcaatatggtttcccatggtgttgcggactgtgtgctggtcgtcggcttcgagaagatgaaccccggtagcttgcaatccatgtacaacgatcgggagaacccaacgtcactgtttgggaagatgatggccgagacgcgaggtatgacgaacgcgcccggtgccgcacagatgtttggaaacgcaggtagggaatataaggagaagtacacaacctctggagtaacaagaaaggatatcatgctaacatgcgaaaaacaggtacggtgctaagaacgaggacttcgccgagatcgcccgcatcaaccacgagcactccaagcggaacccctactcgcaattccagaccgaatataccctcgagcagatcataaacgcgcccatgatctacgagcctctgaccaagctacagtgctgcccaacctcggatggcggtgccgccgccgttattgtctcgcaggagttcctcgatgcgcgtccccacctgaaagaacatgccattctcatcgccggtcagtgtctagccaccgatgacgacacagtctacagcaagagctccattgacctgatgggcttcggcatgacgcgtcgggcgtgccgcactgccgtagccgaggccggcgtgaatgtcaaggatatcaaggtttgcgagctgcatgattgcttctcggccaatgagatgattactattgatgcgctggagctgagtgaacccggccaggcccatgagatggtccgccgtggcgatatcacgtacggcggaaagatggtcatcaacccatctggcggtctcatctccaagggtcacccgcttggtgctacgggtattgcgcagtgtgctgagctggtctggcacctgcgtggctgggccaacaatcgcctggttgacggtacttccgcggcactgcagcacaacctcggtctgggcggtgccgttgtcgtcaccgtctacaagcgtactgatggcaaggccgccacggctgtgacatcagacgtcgttggcaaaatcaacggtttgggctataacccagctgtggaggctaagggcttcactgccgagcaggccaagtccgtcgtgagcaagacgcacagctctcagtatgccctgtcagatacccaagagcgggtccttgccaggttctagaggcacagctaaacaccgttttggccaagcaatttgtacataactcaaccagactgacatgaacgatatccaatttttttttaaaatgcaccctaatctatcccatctatatgcccaaaatgttaagattttattctataaacaagtttcctaaaccgcaaaagaaatcatgaatcatgaatgcgtcttctcccaatcctcggggagcctgtagtccttcggcacagaatactgccctttacagcttcccggaccccggcacttcaaatcacacttgccatataaccgacaatagcactcagcagcactaggacaagaatcgcgattcaaccggtcaagatcaattccccgttcaccagcatggtccgcaaaaagaatgtgccaaatgtacgaaacaatccgcccggctatacggtcatcaccaggcgcagccctagactcccgatacacattccgcgaaaccccatcatcactcccatccagcagccactgcctcagcgcaatatactcactctgagcatgctgccagatgcgctcgcgggaaaccacaaactgcgcacagcactgcgcgcgaacggcatcctgccgaccaagataaagatggacagcactggtaatctcctcgacacgcgcatcagcatccccgccaaagatctggccaagcgcctccggcagtgcgagatccgatgccgagcgcgcactccacggcgacacggcgctcgacagcctcgtctcgagactgccctgcgcgggcacggaagaaggacacgtgccggcgctccagtcgcagcgcaggttgctgtacccggctttcagtgcggcgtggatgtccaggctgcgtaggagtgcggcgttgtcgtagtccgggatgtcgttgtgccaagcccagcggctgccgtgcacaaagacggcgccggcggagggtatgtccgcgtaattatcgattaggaaggttaagtaggccattgcttcatgtccgcggtttgcggggacttggagcagtttggaggttttgtctgccggcgcgtccacttggtacatgcatacatggtactgggtgcggagcggctctagccaggacgggtcgccgtccgacgagacatgggagactatcagggctggtttggttgattctgctaggccggggcaaactccgcgggcttctgggatgatggatgaggttgtttggtagcggactttggtccaggcaaagagtttgtccttggttgattgcgggcggtttaagaataggatgaaaaataagatgcagagaaagaagattagttggataagtgatctttgtacttttcggcccatgtttgtatattaattcatgcaattatatgtgtcttcatttcttttgcctccgcgttgatatttcagatatttcggatcatgcgggaatgttggtgccttaggtgtgaatatcacccctatttgcaagatctgcacgatctgcaggagaagtgccgagaggtttagatgtggatgaacatgtgttttattttggctttacccttgaccctgttatgtttggcgttcattcctgcggagtagtgtcatctgataagtggttctatatatattgtactatcggcctacagtgacaatcagatattagaaccataggagtccttgttgtctcataagtcaggacaaatatagccctctaaaagccataaatagagactagttatggtttttattgttgcctagtggtaatacactatattattttccacattatgtcttatttttctgtcttcgctcttgctttgatctcgtttcaccaatatccccttatagtaatttgctaatacctcctttctcttgaaaatgtctgataaattgctactatacagagtataaagtagcaacataatcatgccacgcccaccgcccacctctatcgttgctcgattcctatgagagacgttgtacttcctcgtgcttatgatcgtgctttgtcattcgaagtacgctttaatcttgatattggtgtgtgcgaacagggcagacagaatcatccacataaatccagagtgcgggaatattgagttgattggatttattgatctccagaacttcgagtcagaatgaatatttgaaaattctacatcttagcatgtatccatatttccgtccactccatttatagatttataccctctttctccgtagatcattcattgagtagcattgtcgggatcatccttcctagagtctttttgaaataacaacctgcaatttcccgataggaaccgcagcaacccattctcgtcgtgggggaaggattgcttcaacatcgttggacttttccagttgttgaatatgatacttttttaagatctgggagacagataggtaaagttccaaatatgcgaagctatttgttttctgggtcagcaaattgaaaataactgtatgtgcacgccaatatcagattatcacctactgattgccaatacaggtactgggacccttggaaaacgggatataataatcgttgcgcagaacagtcgagtcttcactctctttctcgagccatcgatcaggccgataatagtaaggctcagggaaagcagtctcatcatgtaggtaccagataggcgagctggaaatcatagtctgcaaattattagccaaataacaatacttttttggtaagggggcttacaccgccaggaatatgctttccagcaagcaacgatcctcccgtcggtacaattctgggtagcatggctgatgccgctccagtccatctaattccctccttcacgcaagctgtcagtcttggtatagactcgagttccgtcatatcggtggtccaattcgcagccttcaagtctgaaacaagatcattttgcaaggactggttgagggatagtgcccacagtatatgcgcgagcgtggcggaggttgtatcagtgccagggcctaacatctccttgccttctgacaaggcagactctggagaaattctttcccccgccagaaccttcagaaatgacgcctcgggtgctttttcagagtctgttgcaagtttcagctgctccattgcccactggaatactcgttaggatttcaacatgggaatatctttgagcttttggttatacgcacatcttcaaactccttgcttgaggtcgatgggccaccccagccggtaactcgagaagttacttcacaaatcctaccatacattctcattatagtgggaaggttggtgtgctgagaacttatatcagcgtgatctttagtgcaatcatggtacataccagtgacatttttgatgactttaggtcgttttctttgatgatttgtagttcttttcctcccatcaacgagtcaatggacccaatagagcttccaaacgcgaatcttgctagagacatcacgtcaaaaattcgccgtggtgatttaccggatattcacttacaaacaatgtctgcttcaagggctcgacaggtagtaaccaaatcgaaaggtccctggcttaatttttcaagcaagatattaaatctcgatatctcatctaccatcatctgcgtgagaaggggcactttgcttcgattgaagagaacacccatgtgccggcgcctttgtgcatgttcttttgggtctctatagaagcaatttagtaaccttctattcctcgtcttgataattcactcacgtaattgagaaaagagctgggtgtccatcttgaacgaactggctgtagactcgaggatccttgacaaatttactggctggcgcatgtacgcgcttgtaaatatcgagcgagtagaaagatacttcatttggacctattcgaaccaaaggaccttgaaagtcgtgagaatttgtcccaagattgaagtgttgcttttctgtcggccaaccattcttggatccccacgtttgaaagatagtaaaatcagtgttagaactagaacttaccaagccgcttgtgtagctttggtagctccaaagtcagatgtccttgatattccgtggggaattcccatagtaagcgcgatatcggcgcaagtagactggcgtttggaatatgcgacagaggagaaaagaagtacgtatggacaagctttggaaacgatcagttggttctcttaaacagcagtcttaggcctcttagcatacccatataacagctaccagagcactaagaatgccccaaatcaggaatgacatgatttctagaatctcacttcacgattttcaccgataaccaaagaagttacagatgcctttataagaaacaattatatacggtcggccctaagcaacacatcgcttgtacctgccgtattgctcgatttttcccgttgtagtggttttgcgccaggataacaccaccgcgaccgtttgtggcataatctcgcgccattcacaattttcccattgaagagccgaggtccacatttgtacagcctaaaaattctagctctattgatgtcgaatcgtgcgaaagctagtaaataatgtgattgtagtcttttcccctgacttcctacttattctactcgggcccctggtagaatcgagtcaagaaccatacacaatccactttcgcacctcgcagccatggatgatcttaagaatactgaagaatttttggcgcaggaggtgaatgccagtgatgagaatactttggtatggtatcctctatgtgcaacggagatatagcacgaattaacatctgttgtctctcataggagcgtctagggtataaacaagtgagtggaatgatataaatcttcgattcgagaactatatgctgacttgatacttcccgacataggttcttaaccgcagctattcactttttgagaatttctcaacctcgtttggtatctattgctgcgcatggcgtcttgttcttggtcactaactgtttctattagctgctctatatttcgtcggtggagttcgtgtgacattcacgacgggtatcgcagctggagggccactggcttattggtaatgatcccgaaccgattcaagcgcaataaggtggctttattaacctatatattaggacgagttatattataacctgtgtgtttacattcatcacagcagctgtgatcgcagaagcgtgttcggcatctccttctgctggttcgatttatctctgggctgcggaggcaggtggtaaaagatttgggcgactctttggcttcgttgtagcctggtggagcacaacggcttggacaacattttgtgccagtatgtctcttgcgtgtcattgttgtccatatctgaactgactgattgacgaatgataggcaatacccagtcagctgtgaactacatgctttcggtgggtatcatgttgttatatctgacagtgtcaactctgaactaatttgacttaggaattgactgttttcaatgtcgactttcccaccgatgtctcaaatatcaagtttcgcgctgtccaatggatctgcaccgaaatcctcctggctttagccgcattgatgaacctcgcatctggtatgtacactctcatagatggcctagaatgatgggctcacctcttaatcttggcctgcaatgctgattcaattgtacagcgcgagtattcaaatacgtgttttggttctcaaccggtgctgtctttctggacttcatattgaacgtcgtctggcttccaatcggtgcgcacaacaccttcggcctgcggactgctcatgaagctttcatgactacatataacggaacgggagctccagctggttggaactggtgtctttcatatctggccacagcaggtattctgatcggatttgatgcctccggtcatgttgccgaagagacgaagaatgccgccgtcaatgccgctaagggtatcttctggagtacaatcgtcagtggagttcttggcttctctgccgtgatcttattccttttcacatcggtaagtctattcaggaacttttatatagacccataaactaacaattgccagccgccaatcgatgttcttttctcatataacgcaccccaacctttcgtgcccttgtatgctgcacttctgggtgaaggcggacatgtttttatgaacgttctctctgtcgtagctttatggctagtatgttttcgattgctctttcctacaactgacaacaaatgctcgatgtaagaggacatgctaacctatctgatagaataccgccatcgccattacagcagcctcccgtcttgtcttcgccgtcgcccgtgacggagtactcccactatctggatgggtatcgcgggtttctaacgagggtcaacctaggaacgcagtccttgttgtgtggggtgtggccgcgattattacctgcactatcctgccgtccggagtggcatttacttctctggtctcagctgcgggtgttccttcagctgcggcatatgggctcattagtcttggaaggttgactttgacctcgggtgagaagattgaggctaaatggtctctcgggcgactaagcaagccgttccaactcatatcggttttgtggaacggttgggttgttgcggtactcttctcaccatatgaattcccggttgaggcctcgacgctaaattgtaggtgtcgtcttgtcgcgaaactagcagccattggaagagactttgtgctaatatatttccagatgcgccaattatcatggctattgtgactatcttcgcgctcatctcgtggttcttcactccagcgacagcgtgggtaccgcggggccggctgtcccaacctgttgcagatattgcaaattgaattgctggtttcattctcacaggtcgaaaacatgaatgtgtgtgcgatagagggtcgcaggaaagtattgcgagccattaattgttagatcggttgattccttccttcattattcgaaaccatgtttctatccatccatggatatatatcgcccacctgcactttccctgtatcttcaaacacattatgcaacatttatcaagtcacagcaaaaaagacttgagagatttgacagcccattagattcccaagttgacaaattgaaatcgcaacacagaggttgccagatcagccacgtgaccatgacataatccgcgctactggccccgtcgaataaaattttgcgatccgctttctcttttcctttcttcttcacttcaaaacatatacacggtccccaacacactcttgtcgatggaacaatctcactctatctacatatttcagtttagggacccagaccgaagaatgctcgttctaatcccgccccctgacatgcagccagaggggaacgggttcgcttttgagccaacattcccaactatgtattgatatgaaccttgcgatttagtcttgcagacttttatgcttttgcaaccggtgtttactcgcagggggggggggcgggtgggnnnnnnnnnnnnnnnnnnnnnnnnnnnnnnnnnnnnnnnnnnnnnnnnnnnnnnnnnnnnnnnnnnnnnnnnnnnnnnnnnnnnnnnnnnnnnnnnnnnnnnnnnnnnnnnnnnnnnnnnnnnnnnnnnnnnnnnnnngtgtttactcgcgggggccagctttggctggccctgaactcttgatgttgtgtttcaaccctgcgaggcatatgttcttgcaacttgcatggtcatttcctccagacagggatggccatattcgcgtctttgatttactaacacagctagatagatgtagaaagcattggcatcttcgaagtcttgtccgtcatatcttgatgtttgaggtcaaaaagatgcctacactaagccctcacagttggatacgtccttctggagactcccacttgttacgtccgctccctctatggggctgtggtgtcaaaagtaggggagatacattccttgtaaacagctataaattttgaatcttattccaaaaagcttgttactgatatcggagaaaacacaaatatgctccgtcgttgtggaatgctgtagatctgcatctcacatcagtccttgctagggactcgcagcaacccttcatcgaagacctacttcgccatccctgtgagagtatttcccctgcattttgagtagcaatagggcatgactgaagttgtcaatagaaagctcgtgaaacctgcacagcgcctcagaatctgtttgaccaaagccagcatcgaaattactgagcgctcgctcgggtatgacggtcagacttgagtatgaaattcttgcaactctgagacttgaacatggaatgcgacacgattcgtcttgaggcgtggtccgcatagccttggtcgctttttctggcttttgttcacgattcactatcatcggatatcccttgattgatcccacaccaatcattggctccaacagatatacttcatagtagatggcgttaatgcccatacaatctacaaatcatcaaatccctctctcccgaaacagccattgagtatggccggaggcctgataaaataaacaaggtaatactattgctgtttatcccagaaggagtccgaataccaggtgaagacgcgcggtagctagtcgtaacaagactcttcaccctagccccccttggccttccattccctccatgatgtggatcgaaggggctgcatataaatcccacgtaattccccagagcccagggctctgtttctctcagcatcttgtccatttgcaacaatcactcattttctactacattcatttgaagacaagtatttggacatatattcattccttctatctataacctacttaacatacatcaccattcccaatggctcgtttcagtctctccttcatctccatttttttggtccttgcggtcttcgccctctccatgcctaccaagcgtgatgagcaagctgctactcaacctttcagcctcgatggcactctcaaggaattgatggttagttagctatgtcaaagttcctatgagaagttttttattaaccaatgaactcagcatgcatctaagttgatggatggtcttgacaacaaggatagcaacgaaaaggataatgacaccgctgaatccaaggcgcagcagcagcaggccagcaaggaggaggctaaacagggggaggccaaggttgccgcgaagctggccgataaggaggcagctggtgacaagcccactgccacccctaccaagggactttcctccggcaatttcgtgaccccaactgctactcccacccacaaggcaacatctcagcctaacgccttgggcagtcttcccctcatcggtggtcttctcggtggtgctggaggcggtctctgatttaccaatgatcaagcccccatgtattaaactgaatatgagagtgctgcagactgcgatgaacgcaattctctcttggtaaacactggctggtcgatattcgcttttttcttttatgttgttttcaaggggaatggccaatgagatccttgataaatttcacgattaatttgatatgattagttcaataatttgtccgttatgtctccttcccaacctgtatttggtaaaaatgtatccttaaatgtgcttgttcaaccaaaacaccttccctctcattatcagcccatagtcgcatcatgacctctggtcgcggcttgcctgttgttgcccttcatgaagtcccgtatagtagcccgcatagtaccatgacatcatgaggtgcttcaacgactcatcttggactgcagatatatgttagttccatgaatcaccatatcccgaacgtggagcataccatttgccatgattgggtgaggcatcggcatagcaggcgtggaaaccgcaggactggcagcagccacgggttgagaaggctatatattgtcagcgagtcctttgtagaagaatacaacattaaaatggcaatatacctcgggaacaggctcagaaatctgctcgtcaacaatcgagacatcctcattctgggttttgttggcaccatcctcaacaggtttggtgctttgaatgtcactgtcatgtatagccggaacaacaccagtgtcttccgttgctctcaagacatcctcaacattttcacccttggcgtgaatgctccaataatgctgcggtcaggttagatattggtcacgtgaattggacatttggtgcctgacctggtattcttcgacagcatcgtcccaggactgaaccagggcagaatcatcccagacctctgcatgggtcaaggtcactttttttttattctttcccatgacgttgacctatttggcgttgtagtaagtaactagacatcttggcggtgactgtggttatggttgaggcggctcaccgccttccgagcaaatcagggaagaaaaaaaagtttcccgcagatgatcgggcagcgtacagtctcaattcaacacaacaaaacctcaaaatggctcccgataagagagtttcaaagcgcaagggtatgtacaatggttttggttggcgaaattctctttcctttcactaacgatactacagctgcgcctgtcgccgccgattcacccgccaaaaagaccaagaaggtcgaggctaagcctgatgagacaaccaaagaggctgctcctaagtctatcttgaagaagaatgagaagagcaccaagcctaaggcagagaaggctgctgcgccggccaagaccaatggcgagcccactcgccaggtcaagcctcgcaagcgtgctgccgacttcctcaccgacgaggagcccgaagaggcaactgcgcctgtgaaggccgacaagaaggccgagaagaagcctgcggctaagaagtccaagaaggaggaggtcgaggccgcgcccgcgcccaagaaggctgccgctaaaaagtctaagaaggaggaggctgaggccacccccgcttctaaaaagtccaagaaggaggaggtcgaggccgcgcccgcttccaagaaggctgccgctaaaaagtctaagaaggaggaggctgaggccacccccgctcccaagaaggccgccgcgaagaaggctgcccccaagcccaagaaggccgagcccgtcgttgagtccgaagaggaagatgccgaggaggatgtctcccctgctgatgagagtgaggctgagaacgagggtgatgacgaccagactgaggctctgatcaagggcttcgagagcagtggcgacgaggacgagtctgatggtgagggttacaaagagggtgaacctatccccaaggccccagataccaagaaggccgagcgcaagctggccaaggagctgcgcaagaacggcccccccgaggagcccggcactgtttacattgggtgagtttcgaccgtaattcatgatcattttgaaccatctaacatttcatttccagacgtatcccccacggtttctacgagcaccagatgaaggcctacttctcccaatttggcgaaatcaccaaactccgtctttcgcgcaaccgcctcaccggccgctccaagcactacgctttcattgaattctcctcgaccaccgttgccaagatcgtcgccgatacaatggacaactaccttatgtatggccacatcgtcaagtgcaagttcgtccccaaagaacagctgcaccctgagatttggaagggcgccaaccgtcgcttcaaggttacgccatggaaccgcatcgagaagaagcgtcttgtgaagggcaagacacgtgaccagtggtcgaagagtatcgagtccgagcagaagaagagacaggacaagcaggagaagctcaagaaggcccttggttacgagtttgatcttccccaactgaagagcgtcgacgatgtccccatccaagaggcccccaaggctgtcgaggccgctgagcccactgacactgccaccgaggagcctgccaaggccatcgaggcccctgctcccgttgaagcccctgttgaagctcccgttgaagcccccgttgaggctcctgtccctaccgatgatacctccaagaaggtcaagaagggcaagaaggagacacccaaggcggctgctacagagtcaccggctgctaagtctcctgccaccaaggcgaagggaaaggtcactaagaaggccaccaagacaaagtccaaggcgtaaaagggattatctgaaaattgtttctaatttcattcatcaagcctttttccccaaatgcattgtgtttttttcccttgatcaataaatttctttcagtattatcattcaaatcctaaatgcaacaaaagtaaaagtatggtagtcgttgatagggatgccggttgaaaggacttttctcttcgccccaggatattatctctgtctctctctaaaacggtaccttcctgtcttccgtagcagtattaaaattagcatttccccaggcgtttgtgctcgatactttactttctggatatattccttcggaacatagccctaagccgatgccactcgcgctagtctcaactaagcctagcatacatcacctgaccagtgcgagaaaaaataaaaccctctcctcgaagattccacttcttctttttcttcaactcctcgctcaaagaatcgcattcaaagctcacacacaaaaggaagcctcgctcccttttcaatctcgctttgggagaaagtccccggacaccctgcactttgggtaaaaccaaagtaccaagtcaggcaatgcggaaacgcgccgccatagaagcaattcgatagcggcttacgccctattctctcacggtatcccgtgccacccgacggttacatttcacgatgtctctggaaacaatggggtgcgtgctgggtactggaggggggaaggattggtggtcaaacaccttttcttgtattgggttgcctttcgtcatgttcggatagtcatgcgattgcctcctgtctgcttctttggaagtcgatggaggtaactcaatggggctcattcttgaggcgaggagttccttgatcttttcttttcaggagtctgtagcttatggcaaagcggtgatgagattctgtctcattgcagaagccctgtcacaggggccggactcttatatcttgccataggcttcgtttttttttgttcgcgtgatgatataccaatcatagagtcaagcacagagatcccaaggggttgttgacgataaacgatttaaaattatctgatgaacattctacatagccagcttttcagttcgaacagtttccaaaataccaatgcaattgaaatgaatgattaaaatgcagtattcataactaaatcgtagaatttcacttcgtatatataatacagccgttctacatgccacatagctaggctcttgttttttttgggggggattttttttcactgggccttgatgccctcagcaccgacaggcgcatcctccttgggttccttcttctggccagccacctgcaccagcagtgctcctacaagctcggcggcgaacgcaatgctagtcgcacagacattgctccatacctggatgctgacggatccaagcggggcgcgagggaaggacacgatccattcaacatagtaggggaaccaagcctcgggaagcgggaaaacaggcgttttcgagtaccagaattggaggaacatcttcaatccgtttgtgctgatccagcgggcgatcttgacggtccagtcgaaggaggactttttagaggtgagggtcttgtctagaaaccaaagtgttagcagtctgctcaacagatataacaacgtctcctgtagtcttgtagtagtgacacgtactcagcgcttcgtattcctccatagtcttgtcgtgtcgtcttctagccttcgcccacttcgcaaactcatcctgggagcttgtgctgttcatttcgtgtttctgctcgaggacctggcgcttcagctcctgctgcttccgtgcagtccgcgaggttgaggtcggcagttttagataaaggagccatagctgtgttgcaaagagagtaggtgttagcgtgtggaattacaatgtaggtgcgcggcggagctgggaaactatgccgaggccagagatgggtggattggagacatacaagaccatcgacggtactcgcgccgaccgtattgaccaggaaaattgcgacgtgcaagaaaaagactgtgaggacgagggacaacattgtagcggggactggcaagaccgggatgaagcgttgaatgcgacggcgcaggctaagggagcctggaagatagtgagagcggcacagtcggccgactaagtgagtgtctggtagctctgctggatgagattggaaatgtcctgacaagatagatgtggttgaaggtgtgaatgacgttgtggaaaggtggaaataacagcggactcggcctttccgccttcacagtatcacgcactacaccatcctgtctatcacgttgcctatagcatggcaagacaataaaatacagaaatattacaatcaaacaaaatatgatgaggctttgacggttgtacctttccatattcgccaaacaaccaagccctccgatgtccaacccgaaagatgcattccaggaacttgtccgcatcttctcatctagagacaaccaagtcctcgagatcgagatccttccatcaagcctaggcgttccgttcctccaagatggatgctcagtgggaataaccaagaaggtgctagtgcaggccttcacggtcgcgcgccaactcttcttcgaccgattaatgcccatgtccgaagatgaccttcaaaccacctttacgacaaacgcccagtccagaatcgcagactcggctattacagaaatcatgctcctctttgactgcgagcatctcacggcctgcaactggcgcaagcgccgactgcaggcggccatggcctaccctggtatttcaaaccagacctctgccgcagagttgttagaagcagaactcacgctcatgtcgagctaccaatgctcgccactccatcgacataccaagtcgccgaccctctggcatcaccgcctgtgggtggttgtctatctgcttcaaaaacggcattggggtcttgaggacctgtctaagctgcgaaggactgaactagatattgttctccgcgctggagagctgcatcccaagaactattatgctttcagctatatgcgacagttggatgttcttctcgctgctacagcgaatacacctgggcaatcgacatgggaaacccattctgcgcagtcagttgtcgaacgggtggttgattggtgcttggctaacccacgcgatatatcgggttggagcttcgccctctacatgctgagcaatgttccagagcaacagaatcgagccaacgctcttgagagagtggtcaagtttgcgcttaacgttggatgggaaggcgagagcctttggacgtttgtcgaccaagtatcgaggcagtttgggcttgaaagtgtgatcaaagatattattctgttgcactgcgatcaagcagccagacctcctgattgccaaatggttcaagacagtcgacagaagaagtcatggcagacctggctagcccgggcgagagtatgttgggtcgtagatcaagggcaagatacataaccggatatgatatggatgtatgtgtttacgcgtttacgattaccaccaaattgcacctccatgatatttctcatgtgtcgttgcctcgtttggttagcgctgtggtatacatgtttgggctaaatatgataaacgccaaagagattcaaatgaacgcctcgctagacacccagcccccgttttttgaaaatgggcataggcggatggttccgatcttatccataaatccagcgccgtccttcactcgtagcacactttgcgatgctgctcggtgggttgtccgtttcgggcgatcgcggaaaaggtggagggagatgagattgactgacggcttggatctaaggattcgggcgtgttattttttcccgcctgccgctgcctcggcagctctcttctcgtccgctgtagaagagaagcgatcagtaaaccagtctcatgtgggttgggcttgcgtctagcgccttcaatgatacacacccttcctctgcttctcgcgcatgatggcagcggcatcttccttggccctcgcgaattcgctaccggtctgggtattcttgttcttctgtagaaatggtcagtatgagcaaacagaagggggagataagacgaaccgaattgcccgccttcttcagggccttggcccgatcgttgtcacgttggttaccccgtgtcatgttgtgtgatggtgagattatcgcaagagtaccgagagtagtgagcgcgaaacgtttggagagtgagagaaaaaagtttggaggggtcggctggattccggcgaatcacgggggttccactcatcgttcagtataccttcacttaattgactatcgtgtttaccatcggagtaattcttactattttatgcctattggctaatttgatcagcgactatgtgatggctatgattgggctatattcttgccttgtttcgactctggctttatacttcaccctggcgcttcgcctaaaagcccctgtctaacaaccatatgctgtactcaccttggtacacgtacgatatagaattctttgaactatacccaacaggtaatcaggcttgtccgagataagcagtatatttctcctccgactcatattgtgcctcattttctcctcgtggtcactcgataagatgagacggagttccttgcctcctctccccttagcgcctagagaggcatgttactgcatatcctggaacattcgagatacagggagaacaaccgatcttttaggtacaaaagaaaacaaaacacggggaatataggggaaagaagggtgacttgtagccgccaactcgtttcagcatattcgaatatcctctactaaccaccagtcatttggctacaccgagccctagttgagatcccaatgctggaggagtaaataactagacttattctggctacaaccccgatcttgcgcctaagggtccctgtttattgcctgaatcgcaccaatgaactcctgcaggatctctcccactgcagagatggggtaaagagaaccctgccgatctctttgaccaggactctaattagatgcgcaccacttatgtggttcacgcagacgtttcaagtctattcatagaaaaaaaataccatcgcctttgttgggagtatacgtctaggctgctacacctcaatagccattcttccaggtgtttctccattgtcgcccccattcatcccgtttcctttgtctttgtgtttcattcttcttttcttgtcctcgagttgatctcgttatattgcattgttccattctttcttggaatatcaagctttctgctggacagtcgctttcttccctcttttaataccaaccttccccccaagtctgctagcagacatttctcgatacaccctcggcatcgagtatctaccattcttaacaagtgtagcaggctgtgcctcagttatgatggctcatttgcgtgaatccctggccggtccagggtacgtgatcctgaacgtcattcgcgttctcaacattatcactttcatggaccttatagctgcttgtgcagtacttctggcaaagatcgacatgctgaacagcttctttttcttcgaggccgtgacccacgccgttgtggctctggtcagccgtaagtataatcttccttttgtgttttcgtgatataaatgctaacgttggcagtcttcatgatcatctcggagctcccaatactccaaagctatttcgaccaccactggccgatgttcggacaagaatctagcttctactctctcggtgggatcatgatgatcctgggagtttcgacactgggcaacctgaacaccaaggctatgacccaggaaaacattggcctgactttctggagaatcatcatctccgccggcgtcctggcaatgatagttagcgtggtgaacgttctggcagtaagtatcgagatcaaaactcccagcgtatacccttgacccaatgctgacccatttccccaacagagctacatcttcagcgaccccgagaccggcgtcagtgcccgccaggtgcgggtcgacggcgctgttgcaccgcaaaaggcaatgagccggactagcagccaccgcacccttcacttgagcgtgaagcgcgaggaaaccctgcccacctattctcgccaaaaccccgtcaagcgtgccaccaagcgtctcaccggccgattcccactcaagatctccaagcccataagcccgacgcttgttgaggagaacgatgctgcttcctccaagtactctcgtgattctgcggagatccgtcctcccgacctcgcacaccaccctgctctgtactcgggccatatggtttgagccggttgcctggtcaactcggttgagaacggcgtttggaaggaaaggaagaaccgtgctgattgagtcagaattcctgcgttattgcgatgggcgcacccggcgctgttttattacccctggtctttcgcttcggcttgctcgtgtttaattgatttaattgagacatctttttttatgcagcattcgtaggatttgtagatattaaggatagatttgaaaggtaaatattccaaaattagaagagtatggagtagaagaagtgtaggttgagagggcaatgtctagaaaggacgggacccacgttgacgtttggccccgacttcaatgaagctacgttggacattcgaacactttaacacctttctttcttcgaatctcgactcaacttgttagagattccgatgaagtaaggtccatatcatagcaaatatggctccaatcgcaatttcctggggaacgtaagtcttgaagctcttcacatcctccgcaatctattctgaccgtgaatagcgtcaaatcagtcctcatatttttcgccccaatcatactcccacgcttaatcaccgcctatcgaagtctgcgcgtatccatcgcgagccggccaccgccgcgtcctctgcctgctgcgcccggtcgagcgctgaacatattattcggtggcatcgtcttcttcctactcctaagcctacccttcaacccacacgcgcccgaacccaacatcttctctcagactcgctctcgtctaaacacccctaccgatgtcatcttcaaccgtctcgcccgccttcggccagataacttcctcaccgaagccgacaatctcctccagtccaagttcacctctctgggtgcccgcaaggtatatctgacctatggccccgacgccttggtctcgtgccaatactgctcatttgacaacatctacacatacctcctctactacctcccattccacgtgttgttaccacacttggcgcacctgctgctcctaggtgtagccacatccgcgcccatcgcagggcgcgaggcttcccgctggcgcatcaagttcaccctagccggacttgtcctcgcagccgtcgacatctacattatggccacctacgatgcggtccaaagtgcgccacgctctgtgcgcgcgggccaaacaccgccctccggcatctacaaccatattacgctcctgcgcccgctggcctttgtaatctgcgatgtgatctgctcggttgtgctctggctctccgcgactaaccggttctttttcaagccgccctcgaccgtcgagcagattgacgaggcagtgtcgatggccgtgcaaacgctcatgggcgcaaactcgaaactccatgccgcgagtgttacccgcaatgcggtggttcgggattcgactttgaagaatcgcgacgatttgtattggcggactatggtggcttccgagaaccccactcaagggcctggagaaggtggggagcagatcctcaacaatatatgggaggaggaagaagttgctcgggctatgtcgcgggcgatggccggacatggtggaattgatttggctcaattgggggtcagtgccaatgattttgtgcgacacgttacagagggattagaatgaatatcttactctgtattcaatataatcgtacagcgtacatgtagatgtcattatcccatttctcctctcccctgccaagtgtcaataaatagaccgcaaatggtaaactgttgacaccaacatctatattcccagaattcaacaaaatcaaaatcaaaatcaaatctccaaatctcattccaatctcagctcgacaatttacgtgcatgcacttccatccaatcaacaatctcgacactcaacatttaacgaggcggtgagtggatgatcgtgaagagatgaaacgaaatcaccacgttccccctctattccctctcctacaaaaacattttcttacactcgcaagctgttgcttttcctgttcctggttgaacgagtcaagtcaagaagtaaataagggcttagatgaggcaggtcccacatctatttcagcattgatcactttggcttgattccccgttctcgactccccgactcccccgactcccggccctcttctccctcggtggaatttcgaatctcctccacactattggtgctctctccaccatggcagacacaattgtgccgtcgaaacaaatatcagagctcaagggacgcaatgcctacgtttcctctcctagtggtttacgaccggccaaggagaccacgttccgtgaatgggtggtcaccaaccagatcggtatgaagaaacaccccggtttttgaatttacatgagaatgaaggaaaagcaaagctgcacagagccgctgcgcttctaattgaatcccagcacatgcgaaatctaatacgagtaccgctaacactaattgcttctctgcaggcatctcgttgaccactctgtctatgttgctggctcttcataacctctacccttcactccgcccatatacccagccattcttccaattgtcctattacaacgaatcctcggactcctacgtccagggctgggatgatgtttacttcgtcatcagtgcggctatcgcacttaccggtatccgcgctatcgccattgaatggtgcatgcaaccattggcccgcgcctgtggtttgaagcgcaaacaatcggttcgcatcgctgagcagggttggcaagctatgtactattcgttcatctggggtgttggattggtgcgttcggcccgagatacctacccgggaatatataactaaccgctggttcgaccctacagtatctctggaagacgtcatactactggggcgatttcgccgccatgtggtcgcagtggcccgcccgtcctttgtcgggcttgatgaagtggtatcttctcgttgaactggcattcctcgtgcagcagatcttcgtgatccacgtggaagagagacggaaggaccatgtccagatgctttcccaccacattatcacctcggttctcctgagctctgcctacatctacgctatgtacaatgtgtccaatgtggtgctatgtctcatggatattgtggacttcttgttaccggttcgtcacgtactattcgccaagcgctgaacagctactaatacctccacagtttgcgaagatcctcaaatactccaagtttgaaacagcgtgcaatgttggctttggcctcttcatgggtacatggttaattacccgacacatcatctaccccatggtgtgctggtccgtttattatgatcttccccgccaacttacctatggctgctacaccggttcgacaagcgagttcatctcaacagaggcgccggattccttcgcatacatgttcggtccatacttcagtttggacaaccccatctgcttcaatcccgcgctcaagtggattttcttatcattcctgttgttccttgagggactgtctattctatggttcagcatgattgtccgtgttgcttacggtgtgatttgcggcggtaacgccgaagatacccgcagtgacgaggaagacgaagcggaagtcgaagaccagcccacatctcacgccccagcgcacttgactgccagagacggtgcccctaccgacgcactcgagaccggaaacgccccgggcttgggtcgtcggcggtccaacggcactgcctcggtgcgggcgcgcggccgtggtcgtgttcctttcgatccgagtgatcggaaggctctcttaggtcggattggatgtgaaaagcctacgtaaatgccggctttccatttatgattttcctttgaccaaaatttgatgactcccatacgagttgctccatagcatgccatgcctttgtcacataccccatgccgagatgtccatttccgggtgtcggtgctggccatgcaatggagtcccgaattacgatgaactgcgatttccaaggttagtttgcggcacatccttcagtctgcttgccgggtcttatatccactttgtttttgtttttttgatttcttattcatactcattgtcatgtcgccatttgccggctggtgtcggggggaagggggggttggggggtttcctgctgcgctttttgttgccgtgatgatctctacggacttggagtttcgctctagagatccacacaataataaccaatgaagcatttggccttgtacatgtattatagtgccctgtccggtacggacttatagatttttcctagagtgaatacggaatccagcgttgccttgaacaaccctaatccgcccatcacctagtatatagcaatctcgcctagtgaacatagtccctaagcggcggctcctcactcccactatacccaaacaacaacacattaagcaccccaaccacatccgacacagcctccatgcccaaaaagtcatccacatccaaaccaggggcaagcgactcaccacaaacagcatcaagatcaatcctctccaacttccccggcccctcatgaaccaaagcatcaacaaacaaagcatacgccaacggattaagcaacaaagacgaatgcgaatacaaaccgccagcagcacgccccgcacaagcaacctgcacctccacattcgacacgcccaccccacgcacatccgccaacgccgcagaagcccaccccccactctgcggttgcacaatggcgtcatccccagagtacacgctggtcgtcggcacaaacgccgagtccccatccccaccccgcagagcccgaataaaccgcgcatcatacccctgctgctgcacagcgggcgtacaaaacggctcagcgagcacgcacagcgtcgcaacaagcgtcccgtggaaatcactactgacagccatgaaatcgctgaccgcggcctgtgtcgacggccagtatttcagcgcccattgtacgtctacgctgccttgcgaccagcttagtaccccgatggtacgccccgagagtccggagatgtagtttatcgcgtacgcgacgtactcggcgttgctttggatgtcgcctagtgaggtgtctgggatgttgacccatactgggtctgtgtgtgggtttgcggcgaagatcttcgcgtagttgaagtaataggtgctgccggctgggtcggcggtgccggggactaagaggatggggattttgttgttcttgccgtaggaaaaagttgtcgggatgtagattgcgctgcggagggtgtcttcggggatgtcgtagggtgcgtccccgaaggattttgttgggtggattcggggactaggggtttttgtgttgttgttggctatagagtttatttcgtggtttcttatgccgtctattatgtcgaggatggttgttgggactagacctagggatactgtgtcgatggcattctggataattgtttggttgttgtgtggaattgaggcgaggaccgagaggccttctccgattgttgagacgggcttgattttgcctgttgctatatctgatatcttggcttcgagcttagatagattttggtatatttctgggctgaagggagcatgacttgtggaggtgttgaatagtctgttaaatatatctgagacatcctgggcttcttttaatatgtatgaaggcactgggctgccgagtgatgctgatatgaagagaacaaaccgaaaaagctgatagcagtgcattgtgaagcttagctcgattagggctgactatccacccgcgggggtgatccggtgaatgctgacattttatacaagagatatttcatcggagctcaatcatcatcactttcgtactatattcatggcttattagatctgagtttttatttcagcgccagatacacgtctatgtatatcggattccacacctcatatttcggggacattcaacgcaccgtcaatcttttgaacgtttgacatggaaaactctaaagtgcagaggtagtcccccataacgtccgagcaccggagtttcttctgtatctgtgtatcccgagatatataaatcagcccgtggagggtctgctgctacctccttcagaaggataagatcgacagtccacaccgacccatgactcaataggttatgaccaaaaggagcctatgttcaccgcaattgcatctcaagccgggaatcattcctaatctgttttgtgttgcaatttcacgtgtctccgccgaaaaaagtacaaaagcataacctggactaacttcagtttgaattcaaaacgaagaacactgcataaaattttgtattaacatatcaatcatccaggaccatgcacgcgactaccatagacgcgaacatgcctcctgtgggggtatataaatcccggggtctatttccaagatcccggcctcgagcttccagctgacaacttttgtcccacatgttttgtaaatcaacagcggattgcaactgagttgcaagatattcctgcaactcaggcacgggtcgtaacgagtaaggggcttcttttaaacgctgaatctcatggatggttgacgctagcatagtatatttttggaaattgatgagcccttccggtgtcatggctgggtttccgtcttcgataaatgtcaagtctttcaagaacaatcctgttgaatggttaatcatcggcaatttcaacggttcacgagagaactgaccaaggaaaggcacgcacggtgccattgcaacccgtaacgtgtcacggtaggcctggtaattgtgtgcgctgcatgtcatagcttgcaggggccttagagtattgcaactacgttcggtaaccattgcccacgtgcgggcaagccggtagatgggtgcgctttccatgcctgccaggatagagattaccgcggagtaattacggagttggtgacatgtctggaatagaacattagcatattggaataattacaagggtcaggctagagattacaacgtacattggccacattgaccaaatgccctatcacttgggtccgttttttcacatccgattctgcgagtattagggtgccgacccaattagagagctgattggaataccgaatcaaggctctgatgtttggagctagctcgggcgtattggagctgtccttcatttgccagtttttgtttagcaattcatctcgttgtactttgccgaacatatgtgcttccatgatagtcagctgccgcgcaatttccgttgcatcgattttgaggaattggagtttgtttaatttgcgtggtagaataggttttggtgggttggatattgatgatagcgatcttttgtggcactcgagacccgcaagtcggcgctgaatgactgtgagaagttgttgtacggcgcttgcctcggtggcatccgtggcgcgcttggcgaatgactgcagtattcgcaaattttgatctgtatcaatgccttttggctcagaccagaaatgttcaagccattgcttcagaacatttatcacgcgcaatcgtatcagtggctttatctgggtcgtccattctgtcgtctgggtggcgtctaatttgggaggcgagcagtcgaatcgatcgatgaggagctcaataagctctgctgcagaggtaaaatacttataagtggcgaggaagactcgattgaaggcaccgtcgagcttgtcgtggtgcgtcagattttccaccagcgctgcgagggttccggccctaacaacctccacgctgccctggtattggtagacgagtttctccggagatgtgatgtcgtgagatcccgagtccctccgctcttttgtctctgtctgatccatcgcgacgggacagccatggaaggatttaaatcaggtgtcattcgaaccgcacggtcgctgtggtcacatggcattgtgtctgaactacggtcgaggcaagaccgagcgattgataatgtttggctagtggggtactcccagcgtgctaacgaggcatccacttatagtactcggtagctctcacgttaatttctggtcctgcgaaaaaccccgaactatcatccgatctcggatacgatcagcaaccgatcatcggaattttgcttaaccgcccctgccacggaccgccgctaaccgctttgggccacgatcggagagttttgagttatctgatccgaaacttactgagaaccttggacgcgacatgtttattggtagacagaggatccgccgcgtcatttatttctctctcgtgccacgcggtcggagcccacatgtggaacttttcaaggctgaggccgtttaactgttcacgggatttatttgttcccgactactgtagcaaaaggtggtgggtatcattcagggtcgcgtaaaattattatctatactggttctaaaagaccgtgcccctgacctgccgctttttcttcagattgatatcctgcatcaagaatgtccaaggaatcgccagaactataatgccagtcccgacagaaagtagtcgaagttcggcgtaggcataggccttttggatagcaaacctggtggcagatccgactggatagctcagttgcgtgacgagatcctcgtaaatattgttcaaatttgacaattccgattccgggaggtatcgaagaagggctttcaggtatgtgttttgccagatgacggtactgatggtaagacccgcactatcgccaatagtgccaaccacgtttaacacggcgagtgctgtcgcgacatgttggtggtcgacagccgctaggatagcaagctgctcaacaaggatgaatgttgcaccaccgatagcgaggaagatttggcacatcacctggtagccaacattcacattaggctggcggaagtatatcattaagccctgtgccaacatgtagagcggaattgcaatatacaaagtccacttgtaacggccaattctccggattagccaaccagtggctagtagcagcacaccagagaccatgtcgaagatattgacgatatagttggacgtggtgatggataggttattgttgacctgcagccaggacgtgaagtagtagctccagcaatagttcgacagctgataggttgcgtccaagaggactgcaccgataatagtgcggttcgtaagaagtcgccactcgaaaagaggcactggagccaaccacctctcccaaatagcgaagaagaaaagtgtgcagaacccgacgacaagcatggcaataatgtagccggaagcccactcattgggggcgtaatgggcgaggtcgaagggaagctcaaataacacaagaccagcagtgaacaggaagactccaaagactagttactcccagttagagtttgccctctttcgtaaaggataggaatcaacaagtagagaacttacgatcaaattcgacagtccaatgctggatgctttcgaataccgtgcggccacttggtctcttgatccggtagccttctttctccgccttgtgcaggttgtacttcagcataatgtatagcggggcagctactacaggaacgacgattgcccagcagccaaagccccatttccaagaaatcttgtagtagaattcgtccgccaccttgggtcccgcaaatgccgtgataatgtatggggaggaagtgaacgcatacgcgaaagcacggtttctcagtgttgaaacgtcagctgtcataacgtctattgcgtattccataccgtagaaaccggtatagtagaagaccttgtatgcccgtcagcatccgtattcaacaccatgacattcttagaactcacgttggcggcgcagtagatctcaaaggtattgcaggtagccatgagaaccaagccgatggttaaacatataaccatcaacagaaacccttccgctcgaccccatacatccatcatttttgcgacagggaggtaggtggcagctgcaaagacatcacccagagctgtgggaaccgcggatagcgagtgtgctttgaatgaacttgtcacatagggattcagagtaacggtaatcgtagattgaaatgcattcgcgaaataaaggaaccagatgctattggggccctggtattagtgtatgcccgaacatttgtcaatggtatcggatacgcggcacaaaataatacagggaaacatacttgatgaagactgcgatcaatgtacctctcgaccaggtcatggtcacggcctcgacgtcttgaacaccatgctgcgcactcccatccggtatctcctcgagtgccacagaactggtgggactccgagtgccatctttacgatcaccgatcgtgttctgctgtgcgaaggagtcatttccattgtcttcggttgacagccggcggaacacgatacgtgctctgcggattaaagggcgaacacccataatggttgactttagaagtccaaagttgatcaggttgcactacacgtgaaacagtagggaatcattgcccttatagtaaacaagcaccgaagtcgggtttcgtatttttacggactagctggaagccaaccagtcaagtactctattcagcagggttgtggagattcaattgaatcatccccgagccctctccactggcgcttaacagaaattcaataaaaagaaaaagataagatctttcgtgctcgtgcgtgcgttcgtgggccgacccacgccacctttccctcgtcgatcggaaattgcacatcgtgcaccgagtaccgagtatccactgctgaatcctttcgatcctatcacaaatagttacatgattaatgcaaaggcaggaaaacctaaatcggggaaattcaaggcactttatgtctaagcgaggactttttcacgtaacagtttcgcccccaaccgcaatatgtacctcgcttctctagactctctgccaagagttgactaggcgtatagagccgatgaaataatgccattctatgaaggcattggctgaattgtgtgtacctgagcgtggaatatcgcatcgtttattttatttgtcctcgcctacctgccaatccttgtgcgacttccacaagtaccggctaattggctagtgtcgactatgttgctcccaaggtttagttttcaaaagggttagtcacgaggacaaatgaacattgcccaagctagtcaacaaagttatggagtcatggacctgtgtatgcgcgttcacagtcatatgtgaccatgttcagctcctagtcggattcccggatgatatcttccttttgtttgaaaggcagagaggaatatcgaaagagcactccgagggcaaggaagagcttgagaaattagctttcaacacatcccatataggaccgagttatgtcatggccgtgaactatcatacgttcttccagaatcttggagtcccgttagcctccggcggacacacagaatgggaggagtcgaaaggaacggcgaattgcaggccgaaacgcttttccacaatgacctgaaggacatcagtccatcggactgtccgtgtggtacgtcctcataaccttaacggtactattgtcgtacatttgttcatatcggaggaccgttatcggctcacatcaagtatagcgttcagtagcgggttgtagatgaggatgtcgcataataaatcttgggcgacaacaacaatatcgaaggcacttggaaatgaggtaccaacgtctcccatagtcctgcttcttgagaggccaatagctcgtcccgtttcatcgagccagcgagctgtatgtctgcaaactttcaaatctcctcagatttcaatatcggaaaggcaccaatacttggagagtatcgaaagcttaaacatggtatcgcacgtactttgaccatcgttggagatggattagattgtagtgagaataggacagggcaacagggaaagtagttgaaggaacctgtaaaagtggaaagagaaagcaaagcatcggaaatgcattaactacaaggaattcacgacctcaagtggccttcgtggtagaggcccaagtaagggaggcttggtggtggttgccgtatgtgactcgaacggttatggatagaggaaggaacgccggactccaataaatagctattatatgtacttttgagactatctgcatcaaatggaccaataatacttagtttatatggacgaatagatcctatgatcaaaagtcaagaggaacgtattggtataccatccgagaagcatctccagtcagaccacggtcaatcctggaaacccccagaaagaattgatcagggccccggttccacttcgcgatatctgcctctgtgattccaggaggaaacccatctattggccgaaaggcggaaatgggtccaatgcgcacctcctccgggataagcagtgctgttggtattctcggctccatgtccgcacgagcacaatatgagcttgcagcaagttcggaactggggattggctcttttgtggactccagtacacctaagtgaggtggatgatgggctgcgttcatttccattgcttgtgattcttctagctccatgattatttggcccacggcggcccatatgtggcactggtaaaaaccttgcactgagggtgcttgacggagtagagccagtgccgcgcgtcggatacgcggttcacggcatcgaagacttgtgaaccaaagcggaagaccgatattaatgtcaaatgtaaatggtggttgggtgccgtctgatcgcaccgaggctttaggggcaatagcagattgttcaactatatttcggaagtttggtagataagcgtcgaattgcatcaatgacgatgatgtgcaggtctcgagcatgacatgtaacatttcatgacaactcaacagaagggcactaataccaatctcttgcggcgagagaaggtctttggcccgaaggcttgtcatcaacttatcaaacgcagtatgccagttcctcagtcgggtggccagactggatagtatagtattgaattctccgggtagatgatagacatgagcctcgtgtaagtgcttggtgcatgttgcttcgaagagagggatctctacagctaatagcccgatcgcttcccgagcagatttgagtgagtcaaaccgttccgttgagaaatgctcggtgtcttgtagtaaagccgtcactggagccccacggacggcgagagcaaatgttcccaaacggatgaagaccgggataatagtatcctccaacaaggaagctttactcgtagcactagatgctatttgggaacgcaaagcggtaatgagctgcacaccttgacgataaagctgcaatgccccgtctgcgtttccctggatggcctcaatgcagatgaaaagcacacagctgatcagtccgacaaagaggtctatgctaccctgctcaatgcgctggcgaacagcagataccgagcgtgagtaccaacccaaggcatctgggttgtttttagcgagagaaataggattatcacggcgttgtagcataggtcctgagctttgttggggacactcgaatagggcactaatggtgatgatggcatcccaaacagcgggttcatagcggcaaacttgtgggacggtagtgcgccagaaatcaacatccaatccaccaccaatggaggaggcagcacattcgaaataatatgcaaatgcacgtcgctctcgccacaccgtattggtgtttgctgataatgacaatgggttgacgatgagcgaaattgtggaagaaggctgtatgccttcaaagtcacacttgcgacctgtactggtacatcgaacacagctaggcttttcttcgccgcatttgactcgtcgaattctacgacacgctcaatatcaaactctgtctatggaaaaggaagcaagcacctacttgcaagtcttgcatcctagccttgaccttggaaggactcctaggcgacgcgttgaatgatttgaaggaacagacatgttgtagcattctagattcggcttgcgccaacatatctcaacgcgcatattgatcaagtgggccgttgtcacgtgcctgatcacgagatcatggtcggcctgattcagtcgagcatttccgggaaatcgtgagaatgaggtcgggatcagatgggaatgagatgggggaaagagagctgactaggtttgtctagggcggaagtcaagcctttcgctttttggaaggagcaggacttgattgagagtcatgacagtcattgattattctgttttgttctgatatattacacctagctagggatatgggtattagtgggcttccgtgagctaggtccatgtctcggacacaggcaacttatcacgaccatgaagttgcccagcttatccaatttgtgaccactatgcacaagatatcattgcgtccttgtcccaataatctgcgggcgatggctatttgcaagaggtgtgccatagtcagtagtcggtgggcgggaatgaggtccatctctagaattcgggaacgtttgaaagtggatgtgtagtgaagacaagctaggtcggctctcaaccagtattatctctgagcctggcaagtgctgccgcgataccttcactcatctcttcacttggtttattttcagcctgaggctcagtagactgtgcagcgtgcgcagctgttgttttcctgctttccgctaaaacctcacgaagaatcgcctcctcttcatcctcttcatcgatatcctggtcgtttttgtcatccacattcacggctggcagtcgagcccgaggttttatggcaggagcagaagcccgcttcgcactctcgactctgaagtcttctcggactgcatgacaccattgttggacctttttctctccccaccccggtacagcgctaatctgctccggctgtgcatttatggcattttgtaaacttccgaaggtggagatcagactcgcggtatcggacttgttgatacttctgggtactgtgacaaactccaccagcgattctttatatgattgagcctgtttcgctcgaatggcggtgggctgtgcattctctgaggacttgtaaagctcaagataatgcgcagcctctggtgcggaccaacacaatatcaaggtcagattgttgatgatggatgttttggacaactctcggagattgtcttcatggtttggtatgtcgaccatcaccagtacgaggcggagattgtatttgcctgctaattgtttcactcgggcgtagatgtattcggggtgtaggcgatggtatttcaaggagagaaacattgcgcacgttgtggtgccaaccacataatctgcgggaatatcggcatactcccatggtacgagctttatatgggacaggatcgggttgcccttttgtcgcgcggacaccagaattgcggaagtagtaggacggttggtaagggcttggggtttcaactgttgaactttcggccttgacgattcacctggagcaggggagtccagagtcgcgggagtactagggcggttggcaagggcttgaggtttgagctgttgaactttcggtcttgaagatgcactcggagcaggggagtctaaagggcgagaggatataccactcttcgggcgtaagggatccatcgtgtgttgtttctaaaggcagagcgatcaattgagaggtgataggtcgataaagctattgcttatctggatgggacccacaccgcccaggccaatctgcctcgcttttttctgccgctaatttttttgttcttcccagaccgcagaaaaaaatcgcagtcgcaagaaagccaccatggttgaattacacaagaaacgacgtctctcggacgccgaaagcaccgaaatcaaagtcgaagccactacacccgccgccgaggccgcgtccgcacagaacaagagaactcttttcgtccgctcactacccacctcagccacgacagaaagcctcgcagaatatttctcgcaatcctacattatcaaacacgctgttgttgtctgcgacaaagagacaaaggtatctaagggattcggttttgttacattcgccgatgtcgaggatgcggagagtgctctgaaagaactcaatgggtccaagtttgacgggaaaatcattcgcgtcgactatgccgagtctcgtaagcgtgagatcgatgagaaggttggacgcagtgtccccactgctgcatcccgcgaatccaagaagcagaaggaagaagagagagggcagggtctgccacccaagctgattgttcgcaatctgccgtggagtgtcaaggagcccgaggatctgaatgtcctgttccgcagctttggaaaagtcaagtttgctactctccccaagaggaatggcaaacttgctggttttggtttcgttaccatgcgtggcaggaaaaacgccgagaaggcgctccagatgatcaacggaaaggagatcgatggacgccaacttgctgtcgattgggctgttgagaaggacgtttgggaaactaccaagaaggaagaagacgacgacgaggaggaggagctgaaggaagagaaggagtctgatgatgttgagatgaaagatgccgagggtattctggaagagccctcagacgacgaaacctcttccgacgaagatgacgaagacgaagaggacaatgacctggatgagctggacgacttggacgatgatgatgaggcagacgaggaggatgaccgaaatgccactacagtcttcattcgcaacctccccttcaccgctacagatcaggccctctacgaccacttcaaaactcagtttggcccgctacgatatgcacgtgtggtcttggattacgagaccgagcgccctcgaggcactggatttgtctgcttctggaagccggaggacgccaacacatgcgttcgtgaagccccccggggagccgaagctatggccccgaacaaggacaagcctaagtcaaacaccgctatgaagcactccgtcctccaagatgaaaactccgacccaagcggccgctacaccctagaaggccgcgtcctacaagtcgcgcgggccgtgagcaagggtcaagccgccaagctggaagaagagggagtatcacgccgtatggtccgcgacacagacaagcgccgcctatacctcctcaacgagggtacgatcccctccaactccccgctgtataagaagctctctccctccgaaatcaagatgcgcgaggacagctacaagcagcgcgagaccttcatcaagaagaaccccgctctccacctcagtctcacccgtctcgccatccgtaacctcccccgccacatcaactccaaggacctgaagcagcttgctcgagagtccgtcgtcgaattcgccaaggatgtcaaggcgggcgcacgtcaaccgctctcaaaagaggagcagcagcgatcccgcgatacaatgaaggagctagagcagctgcgcaaacaaaagaagatgggtatcgtgcgccaagccaaggtcgtcttcgagactcgcgagggtaccaaggtctccgagaagaccggtggtggtcgcagtcgtggctacggattcatcgagttcttcactcaccgtcatgcgctcatgagtttgcgctggctgaactgccactccatggcagtccctccttctgctcaagctcccgatgaccgggacaagaagaagagccttgttgttgagtttgctattgagaatgcccaggtcgttaagcgccgtaatgagctgcaagctaaatcccgcgagcccaggcccaagcgctcggatgatgccgaggacggagagagaggtcagaagaggaagcgctccgatactcgtggtggaaaaggaaaggatggaagggatgcacgaggtggccgagatggccgagatggtcgtgatgccaagcgcggcaagactggaaatggaaatgcaaagggccccaaagatgaaaaagtgacgaatgaagaggaggacaaggccgctaagcgcaaccgcattatcgggcagaagcgcatgaagcggaagtcccgcaaggggaattaaaggcgtgaatgttacatgtttacttgtttaatgtataggcattatttatcccggcattcagagggaagaactgttcttttgtacctacgcgataccaccaatttcgaaaatgaaaagcatggatttatcacactgggtatataatgtcgtacattctatccatgcaaaggcagccgcttaatggtaatgtagcccttaagtattcttggcaccttcaactttgccaacgatgttataccgcttgctgaagaaagtgtaccactcatccaagacggtcttgtccttgtccggtaggtcgtaccactcaggtacacagtcttcgggcttgagagaagatagggcaagagcacgggaggcgtccttgccagcgaagactaagaaaaagaacagtcagtttgattgttctttatagtgatgggataggtgctgtactcaccgcgatatgaacccgaggcaccataagccgaatttcggcttacatcaaagacaacacccttaatggcgaccagagtcgggcggttagggtcggaacctagtgtaagatagatattagccaatgatccttgagctgggcgcattgaaaataaggaattgccgggtgttgtgatctgtgagggataatcttctcgtaccgtcgcatttggccagttcctcgacggaaattgggtcgtccttgggcgggtccagctggactgctactttgggtgcgaaacgcttagattctccttcttgttcggtcattgtgattgttggaggtgaggtcgagggggaaaaacaatattggggtttggcggggtttgccgaggtcggtacatagccgcttcggggctgcttactgtggactacctgattgatcggttaatctatttaagctattcttattttgttgaagcctatgttggatatagggttagaggattcgatttattttctatatacggagtactctggataggctatatcgttaatctttgacatttccgtatataatgtacctcggccttttggacaatatatcctctccaggtttgacccaatcgtagaatctgcaatgataagaacgtgatcaattgcttattcgggtagattgatacctgcacatgcatataaacagaaagcttctctctttttgccctaatctggttagcacttgtgaagagtgctgatatgggaattctctcatgacgtcaaggtatacacaacatcaactgttagactgcttccttgacataactatcacttgataacacggcagagtgctgtttactattcgagataatcgttccccgacatgcatccacgttcaaacatactaccgacgtcacatgaagacccggacaacaccggaacccatagactctgctgctcagctctatcttgacgatcatgttgacttccaagttgactcgtaaaatgcccctccatagagtagaggggccatgtggagatgaaacggagggggccgtgtctgctttggctgtgatttgtccctttccggttgttctttagtttgtccaacccaaaagcgaaaacaggaaaatcctacccacctgggcttcgaaagaaaaaaaactcttcctgtccgctttctcttatcttcatttattctattcgtgcacttatttatgttgcttccctctttcctggaaatacaaagaccttcgaaatgtcacattcccctacctcggggtatggctctcatactccaatgacggccgccatacagagcgcagagcccacccgcctctctgaccccgaatcgaaacatatcaagatagagaaagagatggaagtcaccgagaaggactcatctagcgccaatggcgcggcctcggtcggtagcggatccatgtatgaccatactcaccgcaagctcaaaccccgccatgtacaattgatcggaattggaggaacaattggcacggcactatacgttcagatcgggtctggactgcgaaccagtggccctggtagtttgttcattggattcagtctttggttagtctttcccttgttatactgtcttgttgactctattgggttctcgacctgggttgtcccggctttgctactttcgacaatatcaacatggacggtaagtaggtggaaatgcgaggaacgaaaaggaaatccgtcaatggatcgaaagagaaagagagaaagagaagcaaaaaagcgaagaataaggaacaatacaacgaaacgaagcatcaagaaacaggattcgaatccctgataacacaatttcaaattccaaggatgtaggacgccgttagcccagacacttccatgcaaaacagatgtatacatgtcgaaagcgccattagccctacctctgccaatgcatctgccgaaagccagtcggacacccaagaacccaacagtcctgcctccgtcctgcgtatatcttcttatactgttatctaggagttgtgtgattttgatcatcactgtctgtacgaacaccctttgcatctttcccaccagcagcattcttcccaccgtatcccatatggcccaatgccatatgacccaatgcgccaacggttcagcctcttgccccgatcgaattgctgcaacattcttgttctctcttctagatgtagtatgacatccaaactcacatcttcttttctaggcttggctgaaatggtcacgtacttgcctatctcttcgccgttcatccgattcgccggccgctacgttgatgaagctttaggtgttgccgctggatacaacttctttatcttcgaggccgctctggtccctttcgagattgtcgccgtcagcatgattatcaaatactggaccgatgcgattcccgtcgccgccatgaatgtggttgtcattgtgctttatgggttggtcatctttctgtgatccgcgcacgcgatgccagctaatagatgggaaacagggtattaaatctctttgctgtgaaatggtacggtgaagcagagttctggctctcactaggcaaggtcttgttgagcacaggcctgatcttatacacattcatcgtcatgttgggcggcaacccgctcggcgatcgattcggcttccgctactggaacgaaccaggtgccttcaacgggtactacaagacaggcgatactggcaagttcctcggtgtcctcgcagctgtcatcacagccagtttcaccatcgccggtccggactatgtctccatggccgccggtgagaccgttaatccccgcaaggtgctgcccaaggccttcaacggtgtcttctaccgtctcacggcattcttcgttctgggtgtcctctccgttggcattctggtgccgtacaacgataagaccatggccgatgctttcgacaacggcaagcccggtgctgccgcctcaccctatgtcatctccatggatcgcctgaagatccctatccttccagacatcgtcaatgccgtcattctcactgcttcgttcagtgcgggcaacagctacatgtactgtgccagtcgcagtctgtacgggctagcgattgagggcaaagccccacgcttccttaccaagtgcaccaacaacggcgttcccatctactgtgtcggtatagtgctcgtcatcggtctcttgagtttcctgcaggtatccaacagcgcagcagtcgtgctggactggtttgtcaatctggtatgatcccctacccagtcccattttcattcccatacacctaattaatcctaactccaggtcactgcctcccaactcatcaatttctccgtcgtcactttcacgttcatccgcttcaagaaagctctcgacgcccaagggatcccccgggaaaccttgccatatcgcagctggtttcagccgtatatcgcctatttcgcttgcgcttgcacaacggtcatggctttcgtcggtggctataccgtcttcctgcccggcaactggtccatcgcgacattcttcttctcttacaccatgatcggcgtcttcccggttatctacttcgggtggaaattctttcacaagaccaagttgctcaaacctgaggaggtggatctggtcactggtgtcgctgagatcgaggattataccagagacttcgtggtcataccgccgaagtaagtacactctttcttttagttatgatttggttctgacaatgcctgtaggaatatcgtatacaagtggttccaaattatctttgaatagaactttcatgggtctcgtcgctgctttggaagattgcgatttagaacatacccaggtgacgtccgctgcgaaccattggccgtctctacttcgaactatagacagcatgtttatatgatgttagcgtcattatgatacccgatattgttataggaaatgaaagaatagacgtgattattagtcgactcgcaatgcccttataatacatctaagtaatatcaacacacaccaaacagtaagaagatgcacatcctccatagccacacacaaagccaagctaagccaagccaagctttccgtgctatatgtctttccttatacacaatcaagcttcacccgatcctccctccgcctccttagccctcaaagcctccagccgcttctgattccgcttcccaagaacgcgcagagtattgctcttctcaatctccgtcatctgctgccaattcccaatctgcgacaacgtcccgtcgacattaacaaccatcggacccaaatgatctaatttcaccgctgtcccgcctccgctcatgtcgagtttgatactcccgtcgccttgttggttcgcgatggggtttaaggggtcgctagcggggaggtagaggtgcttttcaggttgggattcttgttcttgttcttggatctcttggttttgcgtctgttggttttgcgtctgttggttttgtgttgcagggtttgaggacgcagcggctgcagagttggagttggggttcgaggttgagtcacacattgtgcgggtttggtgcgtgcagtctgatgctttgaagctcgttgtgcactgtgggaagaggatgctgtacagccgggtgtttggtgattgcgtggttggcgcgttgagggatgtccaggtagtagagcccgctgagattgtggcgcgtacgaatgggttgacggatagatggaggagagcagcgcggtagactgtgcgcgatacttgcatggttcgggttttggaggtttgatgggctggtgggagggaaataaggattgcggagttggctccggtttctagattattcgagctcgtcgtggattgttacaccgcattcttcaacttgcgcttgtgttagatatgagtttgcatgattaattattacgcaaatagttctatcttgggtatgcatatatattatcttcaattttgtctgtgacatgagattacagagttgagaagaggtgggtgtcaatgggtgcttattttaccatatcgggagtctcaaaacttgcccagtccacctcaaatactccagatctatattctatggttaccaagcatcggagtcctgcgtggacttaccgcatgatacgggtgtaaatatgaaactatcgaaaccaccagttgacctgcaagtatatcagcaacatacacaaagtctactagaagaaacatactcaccgaagccgtaacaccttcaccaacacccttaatactatgccaccaccccttgggaatgaacaacccatcaccagccccaagagacgcttcaaagccaaccccagcatccgaaccagcggacaccggagtcccccaaaccatctcatctaacaacgctctttccctcccctgcatcatctcgtcgccgcggaaagccgctgcctcccgactcccactcttccccagctgcctcctcacagccccgaacacagcctgtccatccgctggcgcaagcagccgcacaaccttctccccagccagctggacaaacaagttcgggttcgggtcgcggtgaagcggcgtgtaagtaggcgggtgtccaatccacacattcgtatcgtatacatcgccctttcccgcacacgccacaagctccggcgtgggaaaatcttctctgaggataggagggaggtcaaggagctggcattgtgctaggtaaagccgcgttgattggggagttgtctcggccgtgcgcatccagtcgaggaacagcgtgagcggcgcgtggaattgccgaaagctatggatttctgccgtttcaccgttggatttggatatagcgtcagccggtgtggattccgtgagctcgagtgggacgaacgcgtcggcgccgtgttggcggagatattccacattcaggcttgcgccggggttcgaggtgtccggtgttgactccagactctcgcgtttgaaccactgtttcagggcggggaggtcttggaaggtagagcgcgggaggattgctggttgttcggggaggaagcatcgctgctggaaggtctccagggtggcatcttcgaggatgttgacaggtctgtattgagggtttgaagaagcggagaagtttcggacgcttgaccggggtttattatgaagggatgagcaactgagtcgcatccagactcggattgaccatgcctggagcttcatccagatcgacgtaggaagggcgagacaatgaagatcggacaacgacctcgggagatgaacgggtggatctccgagataacggtcttcttatcggtctaccacgtgactccatatgctgtttctggaccgccgacacaagtcacccaacacaagctgcagggaagcttgacttgcaggtgaaaaactgaaaactccatgtgtcaataagtataggctatatttagtcgtcaatacctaagataacttccgacgaatgcttacctcaagcgtgcatctatcggagggatctatccgtggactagaactatatatttcttcaccagcgacggtgactatactgttgtcgcattctccgctactaacaacacccctttcacccaaaaatggatcatttatagacagctctcggggcataatcattgtatcacagaccatgatgtagaggaaggacttggtcctccttcgctgcgggcaaattcgcttgtcacacaacttctccccctccctcaagatattcagagaaacgatagcctcttcccaggggattacgtggattatctgtgtgggctacaatgcccgggaagcgttctggccgctgcatcaaaacctacgggataaaatccgtgaagtacttctacagcttcgtgttctacacgcctaaattcatatagaacttggctatcacaggtctatggtcaccctttcgcataggaaagatcgtttacgatcttgattcgcaggctatgtatgtctatggcctggactaccgatttagggacagaagctgaccccatttcactcggcatatatgtggtttctggcagcgaatcaaacatggacggcactgtttacaacttgtttccgcagtacaaagctgggccgagaattgggctagctggagctggtaaatcaatatactatgatggtgcagttaatctattatcttgaccccgctccagactcctttctcagaccgaatttgcacaataggtccttggctggtatcgagtacgaaccctactacaaccaacacaagctgtaaaaaggcatcaagcgatttttcctgagtataatttgcccttcaacccattctaaaaaggatcaatcatgagccatacagggagtattgccgtcaatcacaaagaaggtgcatgaagccgacgaagaccgaggttaaaatggatccatgcagttttgtacatacccttgcacgtctgaaaaaaggccggccatgtgactgtacttccctagccaagaaagaccataacatttaaagctcactcttgccctcccaggtttacggtcgttgaattgcctacaattactattaacttgcaacatgccttcttccatcacccaaattcataagcgccatgcatacggcaaggatgctcacacttattatccggtcctcatagtaggtgctggagagtcgggagtggctatgggttgccggctcaaagaggtcctgggaacagaccagttccgaattttcgagcgtcagtcaggtattggaggtacctggtggatcaataggtatccgggaattgcttgcgacgtgtaggtgatagtgttctaatgtctaaaagctcaataactaacctagaaggtaaagaccagcgacattctactctttctcctttgctctgaaaaaggactggtccacacttcatcctcccggtccagaaatagcacagtatttggcagatgtctgcgagagatatcaaattgtggacaagattcagttgaataccgatgtcaaggaacttcgatggatcggggatgacgaggaatgggaggttacgctctcgcacctcgtccctggaaccggcgatttgactcaacacgaacgagatcgaatcgcggcccaggatggccatcagaagatctacgttaatacagaaattgtgcgagccaaggtggtcgtgagtggtgttggcgggctggtagaaccgaacacatggccgaaggacatcccaggtattgaacacttcgaaggtgacatcatgcatacggcccgctggaacaaccagatcgatttgaaagacaagaatgtcatcatgattggttccggctgcagcgccgcgcaggtagtgcccgagctggccaagccagaggccaatgttcgatccattacccaactcatgcgaacgcctccgtgggtcgagcctgatacaatttctcctgaatatctccctgtgtacgaaaaatggtcgcctagactggtgactaacttgcctggactggcgttattcatgcgatgtgttgttttcctcattatggaaaaaaacttccaggatatgttcacggacactgcatggagccgaagagcgcggccgcagttagagaagaagtttttggaccacatgcgtcaaattgcgccggagaaatactacgagattctgacaccaaactacagcctcggctgtaagagacgggtcatcggcggcacttggtatcgcagtctcaatgctccaaacgtggagctaactactcagcctttgacaagggttaatgcaaagagtgtgactcttggtacaggccgccactatccaccgcacaagtctgaagatgcagttgaggttagagagattcccgccgatgtgatcatcatggccaacgggtttgaaaccaaccaatggctgcacccactgaaggtgattggcagggagggcaaagatctggaagaggtttgggcggagcgtggaggtgcccaggcataccagggtatcgcaatggattctttcccaaacttctttattattttcggcccgaataccgcaacgggccataccagtgttatctttgcaacggagaatgcggtaaactactcgttgaactttatcaagccgatcttagatggtcaggtcagctcgtatgaagtcaaggaggatgccgagcgtgaatggactcagcaggtgcaggatgcgcttcagaagagtgtgttccgtcgtggggcttgctctagctggtacatcactgccgatggttggaactcaaccacatatccgtacgttccttgcttaatgcttcctagttgttactgacatagtatccagattcactcaggttcactattggttgcgttgcaaattccccgtgtggcggcattggaccgcgaaactcacgagaaagggacggattttgcgaggtgttcgaatgactctccatggtgccctcatctttgggcttattacaaccattggcttcttgagaaagaaccctcagcagaaggctcagttggagcagtcattgctggccggaaaggagtggctggcctcggcggtttcgcaattgaagcgatgatatcttttccttgtgtctttcgaaattggagcactatcttcagagccaaaaatatacgcaataacaatattatgatgtgcatcagtatacaaatctcttatattctccaaacgctaggaccaatgactgaccggataatcagatgagtaagctgaatctggggaaaccccgcgggagaggaatttctccgcactttaactcgatagctctcaccggctactcattgagtcgcttcatattctgcaggccatggcttcagagtcaccccagatagaaatgtcaccgccacagtcggatccccgcgatcattccgtcggtgcgtctgattccaacaagagaaaggcggaacaaggaaacggaacgcaggcgcgcacgaagcggaatcgctacatctccattgcatggtatgatatggcctgatataacctgatccggcacattttcctttccgtacctcggtcgctttaccttgcaccattggatagcctgttctgcattcaaagccatacgattctgcctacaccttcggtacttttgtcggcggatccgagctaatcgtggagttttcagtaatgaatgtaagcggcgcaaaatcaagtgcaatggccagatgccttgtcaacggtgtggccacctgaatttagaatgtaagtgggctcatagctcgtccgagctatccgatcaacggtctcatacgctgactcactcgccaggtcgctatgcgcctaattgttgtaataacaatttcaaagattcggagtaagtcgaggagtaaaacccgtccagcatttgatactaataaccgggctagtgaattccggtcaatcacagatcagatcactactctacaagaccaagtcaatagcttgttcagcaaccttaatgaacttcgtacccaaagaccagcctttgaatcaccagattttgagcatctctctcgaaatggatctcaatcagtctatactccaatacaagctgggctagaaaagtcccgagcccggcccccacgctttcatggtccaacaagctcggccttcaactttgacgtggccaaatccagtttgcagaatatgggtatcaccccagcggaagatgggatcccagatggcttgaccaccgcacatgtatctccaacagggtcaccacctcccaatctgggacaacttcttccaaccacacaccctaccaaggatccaatatggacaatcccgcgtgaagatgcaatgcgtctttgtaaggtttacgaggaagagattgggatcatgtatcctgtggtggatatcgccaaggttaccagccaggctaatctgctctacacattcatagaggctgccacccggacaggctttgcacaaagagggtttccgggttctgacggtcttcacgacgaaagctcgattattcttaaattgattctcgcaaccacgctggtcgtggaggggggcggtcagagtgaacttgggcaccgactctacttggatgttaagccatttatagaatcgaagttgtgggagcctcataccatcaaaactatccagctctttgctattgtggtaagccaaagttttttcaaagccgcagtcaataaccctaactttttttcccactctaggctacataccattaccatacggacgatgatgccatggcttatcggcttattgggttggcagcacggatgtgtttagagatgggattgcatcgtcggaatgctttggtgaagtcattcccagatgaggtgcagtgggacgagatcactcggctgttctggtcagtctacagcttggacagacgatggagtttaggaacggggttgcctttcgtgattcaggacgaggatattgatccgaacttaccagaacctgtaaggctgcaatctcttgccacgtatttacctttattaaccaagatgtgaaaattacaggatgcatcgttgccttacttgcgctgcatggtcctatacaaccggatcagctccaagatctggtactctggtttaggctccgaaggcaccaccgacatccgtcgtgatgagatcggctatctggattaccaaatcctgcagtggtacaagcaggttccagaagagctcaagttctatcctgtcgactcccccaaaaacggcgaaaacgtaagcagaggtatgaagagactcagggttctcttatacctgcggatgaaccagctgcgcatcctgatatatcgccctgtgctccattcttctgccagcattgccgaagatcgaggccacgcacagactgttgtggaagtagccaaagactccatccgtgtcttaactcggctgaaccagttgtccgatatctaccggacacagcaaataacattcaactatttcttggttgctgccttggcggttctgttcctagcagtgtcccacgccccggtcgacttcaaccgacaggtccgcgatgaattctatatggctctagacctggtcaacgggtttagtaccaagtcctacgtctccaagcggttatggaagacaattaaaggtctacgaaagatcggcgagaaacttggtgttctcgcccgtccttttggaacggactcaaatgatcctcattcaagcgctgcggtcgccatggccgggctcgcgggacatccaatccaggacctgtctatgtacgggcctctgaatggtgggaatgaacttggaagtagtcctctcaatggactccagatgagtcaagagttgacaaacctatttgaggctgttggcgcatttggtaatttcatatctaacacttcaagtgacggtattaatggattcgttgggccggatggggaaattcagaacactggcgagggtttatctggggttttgggtgatgagggagagtttgcccgagtcattcgagacttattttgatattccagtatatacccttttatatttacctaggtagtaacatagtatcacaggccagttggaaggttagctaattgagtcgatatgaatatcttgcgtacatgtctgcagacattgatggcctgcttctcttcccacgtcagctgacacgtgactcctgccactcaggcaaatcgaaacctgccagcattgacttcgctttagccatcgtgggagacaacagatacacaatagctgtcccaaaacgtgaacgcccaagcctttctctccaactacccaccgcccccacgaaccgaacggacctaacccgattcgatcgacacacccaacctccaggctcgatcaccaatattaacctccgagcgtctttgagctctggtaagtgatccgacggctttcgatatgaaggccacaagaaactgataagattctagtggggccttagatccaacctcttcccgtcgatcgcacaatctcccctctcccgcacattgccatgaacatctagcttttggcccctccatcaacttcaagatctcctccaattacacttgaagtctttcattctgacccccaaaccctgtaccccttttcgccacgagccagcctctccgtgtgacgaaatcgcttcgtcttcgccaacatcgccgaagacctcaccccccagctcggcaacgtgtcgagagagacaggttcggcgttggccgacggcctcgacaggctggatttgagtcaactgtctgaatcgaccctttcgtcatctgtgtccgcctcattcgacatgtcgtcctcggaaggcgcgccggagtcctggatttcctcgttttgttcgttgatgggccatgagtttttcgcagaggtgtcggaggacttcatcgaggatgatttcaatctgactggtctccagtcgcaggtgccgatgtacaaggaggcactagagatgattctcgatgtggagccggaggatgacgaggaagaggaggaggaagaggaggaggaagatgaagacgatgcgctcggcggcgaacctgcatacagaagagccggcgatcggcgacacgcccgagtcgcaagcgatttgagcgtgatcgagagctctgctgagctcctgtatgggttgattcaccaacggtatatcacctcgcggcctggcattcaacaaatgctcgaaaaatacgagatgcagcattttggcacctgtccgcgagtcaactgcaacggatgcaaagttctccccgtaggccgatccgacacccctggccacgaaacggtcaagctcttctgtcccggttgcatggatatttatacaccccccaacagccgtttccactccgtcgacggcgcattcttcggtacaacgttcggatgtctctttttcatgacattcccagatctggatatcgggccccgtctggatgcagcactgtcatccatctcgccacggaatgcagcaacgcagtctcgcactggctctctgacacgcactccggcaggtcgccaggcacggtcgcccacaccagagaatcagccgctagaaatcaacggcgtccggacacccaacctctgcccgggactcggcaagggcaagatctatgaccccaagatctacggcttcaaggtctctgaggtctcgcgtgtcggcccgcgcatgaaatggctgcgcatgaagcccaaaaatgttgtcgagctcgacgaagcgtggaatcacgagcatgggatgtctccgcaggaggcacgcgacgataaggagggcgacaccgagatgaaccctgaacaatcgcaagatgctgccattgcgaaccgcaagaaggccccgatgcgacgccggcgaccgaaccttggcgccctagtccccacagatcctatggacgtgcacggtcgatgaggggataaaaagcttgcattcgtggttgtttcaagattaagtcaccgtgtcaggggaatatctgtgccatgcccttgacgggacgattggttcagagttgatgacgatgatgacagatgtttgagcttggtctactcgctgctttgaatgggattctcttttcttctaatctattgggcttttattctgtctgcgcgcatcttcctggccactttccgcgatcctgtttcgagtacaaggatcaacttgtccccattcattgttttattcttttgttcgtccgtagactcagcacattacttttttgaatggaacatgatagtagtaaacattgcttgccaactatctttttacctacatgcttcacacttttatgactcgatgggtacagagtcaccagggcccacctccacgtcagaagacaaatcatcataagagcaacagagcctcaagtaccacaataccctaaggatctgcaaggaaaagctgagcctccaccaactttgaggctccaactgcatgtgaacgtcgcccaacaggctcgtgtacaccggcgtccccgacgtaacccaacgcatggggaatttcaaactcaaacattccaaatcatgcagcaagtccctaagtctactcagtcatacgctagcgtttgacgttagcacatcggcgacgccgacgtcaaggatgcacgatgcccgtgccacctatgacaacagtctcgtattgattaggccgtgccttagttaacttacttcacactctgaatctgatttgtaaggatacaaagtacataatttataatccactcaaccggtaactacctagacccctgcacaaagaaaacacaccaagtctatatagtgcgccggactggcggactggcggaacggcggatgagcggtccacctggaaatcccattggggatttagcgtatatgtatatatgcatggccacacgcaaccctagtcaattattggggttgggcgcgtagacaacttcttcgacttggtttgtcctattggagtcgtgagattgtggtgtaacgctgggactgggactgtcacatggggtatacctcataaccatggctaagattctttgttggtgacgcgttgcgattctcaggtattggacgatgctgttgacggtgctgttatggtgggtcttggctggtgagtgcattgtttgtgctggcttattggttttggtatgttggttctggttgccttgaatgagggggttttgtattgccacgctcctctcttattctatttcttttttaataatagctagggatattggaccacatcaatatctcagtggtctaaagttggtaacgttgctatattggttttccaacaatgtagtatatctttcttcggctaatacttttgacgatttggtcctttcaaatttacttttgtaagaacatgagttaatatacagatctatgaatgaatggtgagatctttaattaaataaccttgcataatcttatatcttggcactggacacagtcagcctggaaatgagttgatcatcttaaaattaggtcttacccatagtcctggtgtggatcaaggcccattgaagcgagtacaatggtcccccctactcaattgggtatcatgacagcactatcccaacaacataaagcctcgtattactcggacttcggagaaggaaatagagaggaaggggacatctacggctctctcaaccaagccctattgacagaaaaggggttttagctcctaaattacatttcaatgttcgaagtaatatcattgcccgttttaggaaagactgtgtgcggtggctgtagcctcaacccactctataaacccactcgggggacattggagccacaatttagaatcaagtaagaaactggagaaagtaagagccaaaccttagttagaagccttcgattactctattgggagcttatcaaggcttgtttttgcccacctaccacgtcagcaacattaacgagcgcacgttctctctttgcccttcgggaagaacccgagactaaatgctgactgctccaataaatagtctatctcagagacccataattggaggctcatatggcacatggtcgagaatctagtactccgtactgcattcctaattagtgccacgcacagcaacacccgcgtggaaattacaaatcacaacatactctagaccagcagctcaaaacccaaagtcgatccaagaagatctcgaccagctcgaccagctcgaccgagtattgcccatgcatgtcgacccaaaaatagtcgtactccgtaccaagacgccaagcactccatgtatatatgcgtcgcaaatcgccttcctcatctgtcaaggctcaaataacgaagaactcccgacatagcaaccgaaagacctacagaccacggttcccaatactgcggtctcccgcgctgactgcggccagccccgctgcagaatgtggagtttgacggcgcatatcccttaaggcgccctacgggtctgggcagcgataggccgatcttagctggttctgattcttgacattaggatcatcatcatgtcaacggcatttgtccacgggtgttcagcttgctagctcacatatgtagtgggtaattcgaggaactttattccgctgtactttttttttttccgttgcatattcccgttgatttgcgctgttttgtctagcctcggactggggttgccttgtaatggtatgtttgatgcgagggatagatatcctccgccctgtacggagtatacggagtatacggagtaagtcttactagcacggaagctcgaaccacagctgggggatcctatctctttctctctttattcggattcccagcctcggcaataccggccgagttgacatttttggctttcgccgtagataaggttggggacaaatgcgggtgaatcactgcaacatgcgacgtgcgacgtgcagagaggaggatcggtcaaaaatccgctattatacaaacataaaacaccttcctctttggccaatgctgaagccctctggtccgcatctccatttttttttggatcgacaccggtcagggatgggggataggcgggaacgctgcagcccagagccgccaaccctgataagaggaagcccccaggctaagccaaggctaagctgggataggaaaatgaacgctattggttaggccgcatactttcatgcatttagccctttagcacctcgcctctaaactcccgccatgtgggttgagcgggaaggaaaaccacctaaattatagcgttcagcccccaactctccagtaaacgagtacggaagcacagagtaccctaggagactaattcaggccgacagatggaggggccgtgtttttttcgcatcgtcgtatgatcgcagcttttctttgcggcagtgattgcatacagcaacccccgtgccattggtcttggatagcaatcgttggagtcagaaggcttcctcggaaacagacctttgggacccggatgcggatgtacactgtacccggggcgaaacatcaccaatccaaagtggatgtgacggttggaaattaaaacgacagcgtatattgtactagtagtaggcgtgttttacttggctccagtttttcggttggctttcttagggtgtttcttagcttcgaggatcgaagggggtccttggttaacgtgctgtcctaaccaaagtactccgtccgtacaaatgcttgaaaggaggggggggggaagagttgaggcggagcaaagtctcggaccacgtccgtggaccgtaggcatatagggaaacaggggtggatttatggggcggaggataatgcagattgcatcatccgacggatttattggaattccagtccgtttgaaatgtcggagtggctgttttagtccaactggcccaatatcccgggataaagaagtgctactccgtatgtggggtattgtctctttctgcagcgatcgggcttttcccagcagcctggtccttagttgacggttggactttgctgactccgtagttcgagatgtttcttgagtcatgtacttgtgaacttgtccgctttaagatatcggtcggtggtttgtcatctataactgtccacgggtcactagttagggttaccaaactggggacgtcattgacgaatagacggtccctcaatcaccctcgagaccttcagaacagaaaagggatagtctcggccgtacagaatgtctctcgctaggctgaaattgaaaatcccgcacggaggtttgggggccgtggagttaatgcaagttatgctggctttggaccaatcgctgggagaacttccaaggttatatgattctattgtgcagtgatcaaattcgtctgtactctgtagatctggattaatcagaaagcaggaaaacaaagcatcgaaagaaaaagaaagaaaagaatccattcaacgtggctccctggctcacccctgttcccttgacaccacgctaccaatagaaagaaaagaaatcaacgccagttatcatgcagctatctcatcacacatacaacgtaataggggtaaaaagggctaaaacaaaacagaaaacaaaaataaaaataaaataaaagagtggggaggcaaaaacgtgtcgggtggattcgagtccggtgttcggggtcaatagggcctggatggggcggagatacccgcacttcgggctttgctgcccccgatcgccccgatcgccttacggccgtagatcgtactcatacaggccatgcatggagcgcggcgagcaggggcctgattccggtgtgagcgggaatgtgaaaatagatgtctccggtgacgtcgacggtgctcgttggtcgtagtatgcaagcgctggcatctggaaacgcaagcaagatattagctgacgggtcggcaattcggagtagattcagcgaagaaattgtaccgggagcgccgaagactggtgttgagaatgggcctgcgcttgggcttgctgttggcacaggtcgatcccggccatggttgcgtagctcatgctgaacggactgatcaggtcgtcgtcgtaggccagtttgcgggcttgcatcgagggcagcatcggcaccagcgaggggagctgctcgccatattcggcctggtaggcgatttcgctgtaggtgctcggcgccgcgtggtagatcggaggctgggcgtaggacggccggtaggtgtcatacgatgccatagatgggtaggagaagaccggtgggggtgaggccgaaagctggcgagtgcactgctgggcgaacatggtttggcggtcctcgggggaatagtagtcgtacgaggcagctcggtctgattgcgagtggggcttgacatctgtgactttggagcgcggctttgttcgagtctttggcgacggaggagagaccggctctgcgtgggattgctcgggcgaagcagaagttgcagctcgtctctcgagatcctccaagcggcgcttcagtttcttgcctgttgggttgcgccgggtcaggaatgtacactcggaacggtctttctctttttcacttacgatagttgcgttgcgcaatacggttttggatgcgccgacgctctgcgagatccgagatcttggtccagtcctcgtttgggttggcgttaggactgaatgcgctgctgttgaggtgactaccacgagagcctgaacggccatcgtacgatggagagcgattcatagtcaagaggcgaaggccaagagcgatcaaggtagagtacagaatagagtagacagagagggaatagtatagtagaagtagaagcagaagtggaagtgaaagatgaaagtggagggatgtgataacggggctatgaggctaaagatccgtggccaagtggatgtcagtatatttatatataagacgtcgaggactcaaggccattgatcagctggaattggtttttcgggccttgcagctaagccccgtcgcgataaccaggtcagtccgtgctcgaatgccattagactcgacttgccatgtgcacaaaagtcccgggcttatttcgtttttttattttattttttattttgcccagggatccacgttcagcctctggtaatactgatggatactgtcatgaaacgtctaactagatatgtacaatggtcagtctactggaacggatccgcgaaacccttaatatctaatataccaatcactagccaagctgggaccactaaactcctaactcctactactaacaccgacaggccggtctctgatcggtggatctcagatctaatacgtagcaccaaagtggtacggcgtatgatcccaatccaagacggtaggatggattattggagttgggccgggactcgctaggcgttcgctcgagggcgatccttatttgacctgactggcccgagacacgatatgcccagggatgaaacgggatgcgtggactttggggttacaccttttgcctttactttcttctcctatattctcacgtgggttgcttcaatgtgcacggtcgtgaccacgtttttgtttggtcttcatcttggcaacggactaggggataaagatctgacttggttgatcaggatcaggattctggcactattggaataggagaagggattttcgggactatagacgaaaacaactcctgggaagtctaggcgccctggagtcgggaagtcgggcctgtatcgcctacggatgctgaacaattgggtcgtatacttggattcaccctgacgcatgcactggacgagccaccgtccttcgtgactctagaattaatgacactttgcttttcttggctctttttcctgctttattcgtttttttcttttcgatttttcttttctttttttctgaattattcacgcatttccactggttgcctgattggcatcgacaatcccaatcaaggcatacgctgcgcagaaataagggctggccgtattcctttttcgtacattgtagttgggagttaatgtttgcttactgtctagtctaatctacagccccggagatacgcctagacccagattcttgacaaatacgaaatacatcgttcaaagcccggaaatcgggggccggaagggaaatccgaaaaaagaggctcttctcaggtaagacagctatgctatgaataggtagccttgcagggtctctccgccaactcgggtcggagttaatagcaggaatgcagtgcgtattggtccaactccgctagtgcgtgcccgaaagtcgtcttatcctccctgtatagggctgagttggacaccttcttattcctgattgagtaatgtcggagacgcatcccatgaccccagtgacacgctcaacgagcacggcagctcaggtacccggtacatagttctcttgaccgctaatgctgttcacgcctccagttggaattccaagcattgcacagccatcctggcggaaacgcttcctcctgcagggattgtagccactcacataccatgttcgtccccggatgctgggatcggttgcatttcgagccttctagtaacaatctagaagaatgttcctggcggtgggctatcatgcagcccccgaccttgctgtgtccgagatgcaccccccatgacacatgcgtcgctgcagaatgcctcgtcttttcccccgttgtgctttacttgtttttgcaatatttcctttttttgaggagcttggtgtcactcgaggattatcaatgacggcaagctccgagcctcttgcgtcgtgctggcacgttgtcgttctcgcttggggttgttacactaaacgtgaaatggaccgatgtgcgaaagtccattcaagcgagttcactgggtgtgccaacttcattccagttcgcttcaaatagatttgcccaggtcggagacgtcggacaaggcgtccagtgctgaagctggcgaacaacacaatctccgatgcgagttcatggcaactgcaaaacgaacatggtcaacatccagtttgttgctctcttccaaggttatctcaagtcacaccaacaactcggcacttaacttcttcaagtttgcgttttactatatttgtcatgtataggtcaacaataagtccgggagagaataattatagactctcgtcgggggtatcccaagataagaagctgaccacctgttcccctccaagccacccaattccagttattccccgatgcaatagaatccataagagccttaatcgcaaccccccgaatatgccgaacactaaatttagcctatgagatccaacaacccccattgttctccatgcggaacatcctgaaacgtctgtcgtaccccgctgtggttctaacttttgaatctgtagccgaaaggcgtacagcctgggcctgaaaccctctcaagtgcagagaaagccgagccggttgttctttttttgccgttcctctcgcttcatttgtcgcctctgggtttagcctcattccacgtgggccacgttgctgcatgtcgcctattttaccttgttttcggtcaacgtgcagctggatatctgccgttggtctaggctgtattcctgcgatatgatccattcatccgggctatcaattggatggctccataacccttgtgattagattggcatccacggccctgtctcagggtttgtctgaagtcaatgtggaattataagacgaaacaggcggggttacgggttcgggtggctgacagtcgtcagcactatgtttgtgcaaggtcaagctaaacgatctacatatctgaaactccatgtgcttgggatagtattatgctcgtaggtatctcagcattttctctgcaagcgagttaattcgactcgggtttgagttattggctttgaaacgatctcaggcaggtatttctctacataaccgtgtagaaggcgacagcaaaaagtaccatttctacttcaactgcatctgcatctgtcaacaaagtctgcgttggctcttcttcctgacatatttcacgaccaattattttctttctccatcttggtaaatctgtcatggttcgtggcgttatgtgaacaagttccgctatataattttcattgcccgggtgaagatatatattttggcatcgccagcttgtaaactcattgaacattatgcaatcctagcatactctataatgcctatactgtgattatatgtatcaaattctttaccttccccttcctagaggtcctcatgataacatataacagcactccatcaatgcctcgaatggagttgttcttactgttgtgtaaatatgtgttttcccgtatcttctcgtttcaagacgtcgtttgcaccttcctgcattatcccatgagcatctacccgtggacataattggaaaggtaaagaatcacctattgacgcctgaatccgtatagtctggatcataatctctgcaccttataaacgcctcttcttctgttccctctcctcctcctcttttccatcttaatggttcttatttatacacttctatatcctgccctttctccacctatcacattcctggcaaggcatttgcaatgagatcttatcaccttgaatcctcccgcatgctctttggccgtatgttgatcaaaatatcgataagtgcagcttggttcttcttccaaggggtatggatcaaggacccgtatcccttattagaggagaagggatgcacttagcgatattctgataaacataatgccaaaaaacatacagaacagattcatggaaataagtctttgggagtataggaggccactataaaccaccagatggttctggttcatcgttgccgattgttactccaatctttattctcaatcaacgtccaaggagtatctcaatggagttgaactgacttggtaagaccttcgtagtttgtattttctccccccagaaacggtaatatgccaatcatacagcacgtgttactcgaagtgtacactatacatctacgaagttgtaacttaacgaaaaaccgaggataccaaagttcggaaaagctctctttataaagaaccaagctccagatgaatatgtaaaagacgcccgccgctgctcggtagcctcggtacctcaaatatccaaacaacatgcaaaatgcaaaatgcaaaattaaccaagtatcccttgagcaacgacttttgaaagcctctgcagccatactacaaagcttaggcacagaagccctttcatctcacatgtcagtcttagagcgcgacactgacagattgttagtatatcatccaagttcaacaaggtcagtgccaacttacctccattcgtgcttctcgtcaccgtattggataccctccatccagttcttcatctggagagcaatctcacccgcctcctcatccgccttcaaaccacagtcaaccgtcttacctctgtagctgatgttacgaacagggctgacgatggcagcagtaccggaaccgaatacctcgatcatgcggccctcctcggctgcctcggcaacctcggacatgcgaatcttgcgctcgcaaatcttccagcccttggggccgagtctctcacgggcgagagtcagaacggagtcacgagtgacaccctccaagatcgtaccgtcaagaggagcagtgataagctccttctctccggtctccttgttcttcaaagcaatgaaaaggttcatggtgccgacctcggtaacatattcctcctcgccgaagagccacaggttctgctggaaaccacgggatgcggcctcgagttgaggcagaatgcagggagcgtagttggctccaagcttcttgtcaccaacaccgccgggccaggcgcggacggcgtaatcagtggcctccagggagatggccttgaacccagttgggtagtagggacccacggggctggcaatcacgtacagaagagcggatcctggtgggccaactcccagggtcttctgggtaccaatcatggtagggcgcaggtacaaggagtagccgcgagcgctgtggaggttagcaaggatgtccatctaatctacacaagatacactcactcaggaatgaaccgactatcgagcttcaccaattctccaataatcttcgtcagggcgtcaccatcaatagtaggaagggcaatgcgcgccgaagacttgttcaggcgttccatgttcttattggggcggaacagacggatgccaccggtgctgtccttgtacgccttcataccctcgaagcattcaaatgcgtagtggaacacacaggtcgcagggtccaagctgaggttctggtaggggataatgcgaggtgcgtgccatccgtctgtagctgtccactccacggagagcatgtgatctacattacatccggtcagggtctggaaggcaatagagcgcagagtttctcttacctgtgaagtactttccgaaaacaagatccttggattcctttagctccttaggggtggtggtcttggtgatagtcaatttggaagggtcaagacccgggagctgggaggcggctgccatagaggcgctgaaagttctctgccatgtccggctggcggtaatgttctgtgatgagaggacacggggcattgagagcccggtcagagcctgtcggcgagcgaattggtgaagcgacttcatgactgtggtgatgttaggaacgatccaagggccagccaagggtatagagagtgaagagtgtggcaattgagtcactgggagaagtataaacgtactgaaatcgaggaggtcaatggaggtttatatcacaaccagaaagatgactccgcgccagaactgcagcctctctgcggagctcgacaacaactccgatgactcggaggccccaatcaggaagttctgccaccgccctacagataaagattgtcgctgccaatcagcgactgcaaattagagttgcccgccgacttcggctagttcggcttcctttggcttgctgcggcttgcatcggttacgaccgagctcggtagggcttcaggcctgaggcacatgccaatagtttatttatgcctaaggcaacataccagctattgacacgatcacgtgataatatcgattggaagagtgcctgttatcgaggacctgaggtcgtattgcgccggattattgaccaagtatgcaaccagtggacaatttctctcagcctttgagctaatgttcttaacctcccattagccatcgagtttcaacaccggtccaccttccatagaccctctttctaaatcccaccgttgttgaaactaaatatgtcttatgctggctacaccgtgacgacactgtgaaacgaacaactcccttcattccgactatcgtgccgaccaattctcgtctgcggccttaccaccatgttttcgtctgcgctcaaatcgttcagttccaacatttccgcccattaccagatctcacctaaccctaccgtctactccggcccctggaaaatccacgatgcaaagaagaagtccacaggaacggcggcatcggtgtttatatttgatcgcaagtcactggagacacgctctaatgggttcggaaggagttctgggtcctccgccaagaagctacaggacgatgtgatcgaacgactcaagcgcgaagcaagcaatctcgcgcgcctacggcacccatctattcttcaggtactcgagcctgtggaggagacacgtaatgggggtctcatgtttgccacagaacatctcaccgcttcactttccgggctgctgctggaaaaagatgaccaagagaataccacacgcgccggttcgcggaccagccgggacctggtgtaggagnnnnnnnnnnnnnnnnnnnnnnnnnnnnnnnnnnnnnnnnnnnnnnnnnnnnnnnnnnnnnnnnnnnnnnnnnnnnnnnnnnnnnnnnnnnnnnnnnnnnnnnnnnnnnnnnnnnnnnnnnnnnnnnnnnnnnnnnnnnnnnnnnnnnnnnnnnnnnnnnnnnnnnnnnnnnnnnnnnnnnnnnnnnnnnnnnnnnnnnnnnnnnnnnnnnnnnnnnnnnnnnnnnnnnagcccccgccggccggctgggggacccggccggtacgtggttgaggaggctgacgggactcggagaagaagagaggtggagatggatgagttggaaattcaaaagggactcttgcaagttgctaaaggtcttgaattccttcacgagtctgcgggcttagtgcatggaaatctgaacccggaggccatctatatcaattccaaatcagattggaagatctctggtctgggatttgcggggcctccagactcttctgaaactcgttcgacgctaccgccattggctgtgtccgaggttctctatcaagaaccaaggctgcccgcttcggtacaattgaaccttgattacacgtcgcctgactttgccatggactccaatgtgtctgcggccgccgatctattctctttagggctcatcatcatcgctctgtacaactctccgcatgtctcgcctttacaaacgcacgcaaatttgtccacatataagaaactgctgagctctccgtcttccactccgtcacagagcaataatttcctcagttcgaagccgattcccaagggtctactttctgatgtcctaccgaggctcattacccgaaggcctgcccagcgcatgaatgctcgagaattccagcaagcacagtacttcgacaatgtgttagtttccactatccggtttctggaatctttgccaacaaaaaatcccaatgagaagactcaattcttgcgtggcttacaacgggtactacctgagttcccggtttctgtcctagagagaaagctattgggagccttgatggacgaactcaaggatcgggaattgcttccgctcatattgcaaaacgtgttcggtattcttaagcggattcccaacggacgccgtgtattcccagagaaaatcatgcctcgtctaaaggaagtctttggagctggctcgggcaagggggctgctgaacgagactccaagaaagatgctggtctcatggttgtgcttgataatatgaagctgattgctgataattgttcagggatggagttcaaagatggtgagttttgtaaatggaaacctttgagcttaaatctcacgcttctttctagatattctacccttgattcggctcggactggattctcccactcattctttggtggatgcttccctcaaatgcctccctgtgatgctcccagttcttgatttcagcactgtcaagaatgaggtattccctcccattgctgccacttttagtcgcactagcagcctcgctatcaaggttcgcagtttggaagctttcagtgtactttgcggcgcctctgcagaaggttcagacgggtttgacgatgatttgtctggaatccaggcgactaagtcaaaaccagccaagtcctcgatattggacaagtatactattcaagaaaagctcgtcccgtctctcaaagggattaaaacgaaagagccgtcggtgatgatggcagcgttgaaggtgtttcgtcaagttggaactatcgcagataccgaattcctggctttggaagttctgccggttctctggagtttcagtctcgggccacttttgagccttcaacagttcaatacctttatggctctgataaaaaccctctcagcgaagattgaacaggagcaaagcaaaaagctgcaagagctatcctctggcgctggaccaacgggtttccaaactggtgccgacgaattttcgcagtctgccactggcctgggctcgcccgatgcggacggcggcgctggcagcttcgagcgccttgttcttgggaagaaggcattgcctgcaaatggccagagtatagatatgtggggtagtatggagccagccaagccagcggttccaagcatgctgccttcattctcgtggtcttcaaataatgtaggcatgacaccccaagccaatgccttaagccaacagtccaatcttggattccgttccattactccagatcagaaattgggttctttcccggctcttgctccttctcggcaagcttcaccggttgtccaagccttccctactatgcagccctcatcttctacctggggagccccagccaatgccaatgttcggtcccatacaggcccaacaggtcagtctttggggtccatgtcgactatgataccctcgaatcatatgtccgggtcaacggcgcaaccggcacccaactactcctcgttctcaatcccccctcctcctacaggaaacatggtgtccaacaacgctacgagaccccctccgatgaacacagccaacagatcaacgtctttccaaggcaccgccgcgacaccacaggcaacgcaaaagcaagggttggacaagtatgagagtctgatataaggaacaattcttgttattttctggctgatacaccttttgattgctgttattgctgcttttgcacattcccggcatagtaaatagtcgcagcagcagttgtaattaagaaaagtgacaaaagaacattcaattagcaaatcagcccatgccaagcaatgtagatcgggactccatcggtgatccggccgttggctagggagacacgtacctgattggtgcctcttcatactctatgtcatacttcgtcgttaaacccctccatatgcactcaatgcgtggcattgcgccgcatttgtcctcccggagctccgtgtcacctttgttacccctccatcgaatctcacgccggttgactcccagactggcaaagaccttctcctcgtatactcatctaactcgcgccgccatggacctgagcatcaaacagcactatctggctgactcacctccgaccgtggtcagactggaagtcaagtcacactttgatacactcaaagaccaaaacttgagaaaatatgcgcactttatgagcaggtatcgtgttcctggattccacctcaagagctattgacagctaacctttctcgttatacagggccgcgtttgagggcactcgagtcaccctgcgccaggtctcccccgagtccgaacctatatacgacctcatcctgtcactctaccacgccgccaatggcgactggaacagcctcgcccagaaaacacaagtcagtcccgacgacctccgtttcttcctcgaatatgcgagtcaattcttgggcaactgcggaaactataagggctttggtgactcaaagttcatccctcggctgtccgtctccgcattcgaggctctggcatcggcgaccgcggagacaaaggcagctttccagaaggcgaacaccaccggaggagggatctacgagaccagcgaaggatcgatgatgcacctcggatatcccaagggcggccacatgaccacctactaccccgattcgccaacaatctcaaaggaggaaatcacggcagttggtgacttgatggagaagaagggacttgcgttggagaatactagactccggaagacatcctcgggtgatttcgagcttttgatcgcgtctggtgtttcgtcgcctcctgtgagggaccgggatctcggcgatgtggacacatttgagcttgacggagatctgaagggaaagaaactgcgtcttgtcttcggtgaccatcaggaggagatggcaaagatcgcgcacagcatcaagcaggcagaactttctgctgcaaatgataatcagaagaagatgttggactcatatgctctctcgttcggagctggatccatcgaggctttcaaggagagccagcgcatctgggttaaggaccaaaagcctgttctggagacgaacctgggctttgttgaaacatacagagacccccacggtgtgcgcggagaatgggagggcttcgttgctttggtatgacatgtgctagatcttcattggccggtatcgctaacattcgcaggtcaatctggagcgcacccgcgcctttggtacgctggttgatagtgccgagagcatgattcccaagctgccctggggtaaggactttgagaaagacaagttcctcagccccgacttcacatcattggaagtgttgagtttcgccggctcgggtctcccagctggcatcaacctgcccaactatgatgacattcgccagaaccttggcttcaagaacgtgtctctgggcaatgttctcagcgccaaggctcctaacgaggctattcctttcattgccgagaatgaccaggaggtctaccgctcattccgggacccggcttttgaggttcaagtcggtatccatgaattgctgggtcatggaactggcaagctgttgcaggagacagcgccaggggagtacaactttgatattaagaacccacccatcagccccgtcaccaacaagcccatttcgacctggtacaagcctggacagacatggagctcagtctttggttccattgcttcgtcatacgaggagtgccgtgccgagtgcgtggccatggttcttggctgcgactttggcatcctgaagatcttcggattcggcgatggcaaggaagacttggctggtgaggccggcgacgtcctgttcgcggcctacctttccatggctcgcgccggtctggtcgccctggaattctgggatccgaagacccagaaatggggccaagcacacatgcaggctcggtacagtattctgcgcaccttcctcgatgctggtgatgactttgttaagttgtcttacaagaaggaggatctctctgatctagagatccatcttgatcggtctaagatcctgactcatggacgtcctgccgtagagaagtacctccagaagctgcatgtctacaaaagtaccgcagatattgaggctggtaagggcttgtacgacgatattacctccgttgacagctggtggggaacctccgttcgtgaggtcgttttgaaaaagaaggttccacgcaagatctttgtgcaggccaatactattctggagggtgaccaggtcaccttgaaggagtatgaaccgaccctcgagggtctgattcagagctatgcagagcgtaacgtctgatatatttatatacagtatacaaatgaaatgcatatatattatatatctctttcccatggaagtagctacatatacatatcaatagcctcctttgtgatgtcttcccagatccgtttggacgacctttgtgtgactacccctattccacaccaaactactccaacagctcaggatttctagactaggtcgtatttgattctttccgctcccttgctattcatcgtaaaatccaagtcaagactatgcggcggatggacattccaagattgtacacaaaccctggactataaaatgatagatcaatagtacaacatagtcaggtggggaccggctgggaataggtcaacacatctgactgacttcgagtcacgcccatttcatctcgcaataatgttcctgtaaaatagaaactcgaaattgaatccaaactaaaacgaaactaaagtacaagacagaggacaccatatgtgccaagtttcgatggtgaggcgctcggacttaccgccgtccaagttgatctacccgtcttccccaacctctaagcgctctccttctccaacactcaatcactgcgaatctagcagatgaaagcttatatctgttcaactccctttggaaacaatcctttcttcaaccaggtgctggaagtcagtcattgaattggaaagactcgccgacacagcaacttggacgacactcgacccagatcagtcgcattgctagactaggtcagaattcgatcatctcgattgcgcatatcagcctgtctgactgattcaggcaataatagaaaccacggtgtcgcgagaaacgccgccgtcggacccatcaaccacggcgtgcccgccccatccaacggactccctagaggaggacgacgattattacactgcacctccaccgcactccccagcatcagtgtcaagttcctccaccgcatatcctccgccattttcgtctcttaccttttcgttaccgcaagacacaaatcgcccttacaaagttactgagcctggacccgcttgtcctccagccttagcgcctccagcacctgtcgaggagtcgctcgagccggccccatcttcggcagttgttgctgatacaaaagcgtctttcaccgaaccaaaaaacgagggctcttccgacgacggtgaaccaccaccaccatatacagaaggctatagtccacttgagtcattcacctacgtgatggctgctgcaggaggtgcctccagtataataacccaggtccagcagaccgggggtccgccaatcaacactcttggtggtatgtttgtaccactgccgcttggtatgctttgcgctaacagggtataatagatatcggcggagatgaacatgttggtctcgaccttcggtaggtcacaaattgatatatctcaattatgcatagtctaacaagttgatagtggtacgcgctttaccctttcgcgggatgagctgttgactttgcctgaatttgttctgctctccctcttccccaatggcctcctcccggatggacatgctgcaaatggtttccacgatggggatgtattcccggttgacgtacgcgaatccctatcttgagtattgaattctttctgacatttattatccagtatgacccagtctcacttcagtacatgctggatttcttccggactgtcgcccaaaccatccccgcatctctgccttccagctcaaactcgccagaaatggaaatgcaggacccattgcagggctcagcccgtgacatgctgcaagaccgtgctggcattattgttctccgtgaggaccttgacttttatgtgatccctccctacgccgatattggacacgatgaaatgcttgaagtcaagcgggcggccggcagatcactgttgaaacaggacggcatcttttctggactgcgcaagagcgaggagattggatcaaccgagcagcatcttattgaaatgctgacagctgggtgagtagaaccgggttctcaattatggggccaacgctaatatacaatatagaggatttgatcgttctgaccagtggggccaccgtgctccagagcccaacaaggcagtaatctgcagtcttgcgctggccaaactccgcactgacatccgcggagacctgtcaaacaacaattctgtgggcatggcccagaagcttctcctcttttggcgcaagcctgcccgccgctgctggtgggagggtatcgagctggacgacgtcgagggcgtcgagggacaagtaaaggtctggatccggcgtgtgtggactttggagatggtaagccccctattctcagttgactcaaaattcttgatagctaatcccttcgcagagtgttattgggctccgctaattttgtcccccttattctttcctttgcatgtgcgattatcattcccccggccttacggctcgaagtttcgactgttatttttttctaaagttgcattgaaatatgtctgcaacaaatattcaagtttccatcttaccagcagcagcgctgtactcagcattttggtgtactcattcctttcaatgtattcattttctagtcgattggtaaacgctttcatggacatcactttgacagtgaaggttggatatatggtgcagatctagtttgcaactgtagccttctcctcacatgtcgtttgcttgttttgtgagccttgtatccatacggcaataggctcagtccactacgtagcagaacagcaggcaaatgccagtgcctcttgatgatgctagacctggacttggactgcacgaccatggatgatcgcggtcttgacaggactctgcctagcctggcgcatctaaaattcgtgctcgaaatcaaaggttggccagcgggtgagtttatggtcacataggacgcagagctctgactcaggaaagtagaacgtgccgattgaaaccgcattgggcgtctaaaagaagacggtgtagaagccgcagaagaagtccgaaaaggccgcgctctgcacgcgacggcaccagactactgcatatagtagaatacttccgtcttgactgcacatctcgaacagatacgaccatacccaaccctaccggtctgccagaaatgcactcgaaccaactaagaatgccctggtatcgtgatgagctgtcgctgatgtttcatgatgaaactgaatccccacgatcatgcaagaaataccgaggcagtgatggtggactttggggaaccatttttcagaaaggtcctcttctcacagacgtccttctctcgcggatgtcctcttgttacagacgcatttcacggacatgctcgaatgaagcagatggagtgacggataagctatgctatacctttttgtaacaccatgctttttatattcagtgaccaagggagaccatttacaaactttgatgtatagaactacaatggttcggtgtgaggcatagcacgtgatgccctacctggaacaggactagcgtcgaatttggcaaagtcgcgcagaatatcgatcccagagccattctccagctgtattctttctggatacctttgacacgatcttaactttttttctaccacgttactatatgccgtggaatcatacaagtacttgttgttaactttcttgcgcttgggccattcccaattgtgcctcactgcagtgatcagcccttcgaacatcgagccgatcaaaacaatcgcaagctcgttcttttctcgcgcataccctcgaagaggcatgttcttgtgcaattgaatcgccaacatgtctcctcttcggggctatatcagttcctaccctccgcgcatgcgccattatggaaacgcgttgctcacacctgtcaatcctccgtctcaaaccggcccgactccgcgcaccacgaagcgtggaactacagccatcaattatgctgaagacggcttcgatgacgaggatttcgatgagactgatgggccccggcgcccgacgggactgcgaagtcttcggcgcgaagaatccgccactgacaagtcggtgccctactcggagaagctgggcaaagaagtgcatgcgcccgtggaggtgcaaggcctctttcgcgagtggatgatcaagagaatgttgcgaccagcgtatgttccctattgccagggctgatgtggccattaacgacagtggcctctgtcttccctgtctatccttggatctggctaacatacagcgtggtgattctaggtgtgccgatcaactgcagattcaagcgcaactccccttgacgctcgttcccatccgaattgatgtcgaagtccccgctcatcaacccctcgaaccattccccttcccacgcgcagtcgtggaccctaacgtcacccacgctcttcctgcctatcgcagacctgaaccattacccccgttccgcattaaggatactttcttgtggaacctccatgaatcactctcaacgccggaggaatttgctattggattcgtccgcgatctcgatctcccaaatccccaggctacgactatgaccatcagcaaccagatccgacagcagctggaggaatacgctggtgttgctcttcacccactttttcagagcacagacgcaggcacagtgcccagcgttctgccacatacagagccgtcaagagagacaccaacgacaccagctgctgccgttgcgacacctgatagccggcccaatgtgacgaccactgtaactgtgacgaaggaaccgctggtgaatgacagccttttgaacccagatgacgcatatcggtgcttgatcaccctcaatatcaacctgcaaaacaagctgtacacagacaaattcgagtggtctctgctacacccacctggcatggctgaagagtttgcacgcatcacttgcgctgatctcagccttggtggtgaatgggttagtgcaattgcacatgccatctacgaagcagtcttgaagttcaaaaaagaagtctgcgaaagcggtgctcttgttagcggctacggcaatgacattgacaatttggcagccaacggcgtggaggctggctggcggtacgaccctgaaaccatttgtgatgagtggcagcctcaagttgagactctgtccaaggaggaaatcgaacggagagagggtgaccgtgagcgtcagatccgacgtctgcgccgagaaacagccaggttctcttcaaccacgggcatcacacctgagatctcacgacaggccagtggcaattacttcgaggtggatagcgagactccgctgggacgtggagaaagaaacaagcgcaagcgccgattccgcagcttgagcccttcaggcagaagtggcactcctggaggccggggaactcctgatactggatcaggggcaggatacggtggcggtggcggcacgctctccgagtggtatgtgctgccagatacatattgttggaatattcactaatgattctgcttagggaacgtcaaagctggagatgcaagaactgcgcggtgtggggcacagcagtttgggctgtgcgtgatggtccagatggcccacgggtaagtctttactttagaatgtcttgcaaacagtctctaaccatcctctgtagacactctgccacaactgtggcctgctctatgagcgtgataaggttgtaccggaatggtccaaggatcttcatcgtcacgacgtgcccatcggtcgatatggctaaatcaacgccattttccttgcatcgccttaatgtactttcctaagcttcaatgaccttcctcacgccaccatttctcctttctccgtgttctttcaacatttaatccgctattggtgcactttcaatcgatccggcgttacggcgcatcgccttgttatgttgcagatcgatttccatccgcaaaattcgggggcgttactgtcattgtgaatccacatgtttctctcagtcgacgtctttctgtcttgcctccagcacatgttttcgatggatggctagaaggcaaagagctaggaactagagtagaaatgcaatcagattagccaatgatccactttgaagtacaaccgatctttgatattgatgacattaaaacatttgcaaatggtcttgtagacttacctccctcacatccttttattgatttatggatattctggaatgaagtgaaacatccctgtcttaattatactcgacaaggtcatccttcacgacgagcctaaccagtctggcactgactcaacaaatcaaccctcaaggaacttcagaatatgatcaaagccctcaggcgccttaacccaatgcccatccccctccgcacccgtaaactcctcccagtcaacacgtcccacaatcttcctcagaacctgacaagcctgccgcccaagctcaacagatacccacggatcatcagccccatgactcaaaaacacaggcgtctccaaaaccgcaccaccaccaaccttaccctcaggcaccacctccccagcaccagcaatctgctcaaaatagaaccccgaaatcaaactccgcgtctgcgcactcccaggcccaagctccggctcagacaacaaccactcaagctgctgcgcaaacggcaaccacccacaaaagcccagcagcccacccagcgggccctgaaagcggcccgtcgccgacgcagccaggaacgcccacaacgccgtcgccatgccctggctcatcccgctgagatagatattaccgtatttcccatctagcaggcgcgcctcgtcgtcgatgatagagaggatgttggcgatggactcgcggagtccggccttctgtagctcctggtgctcgtatatgttgtcgagtgagtatgcgtcaaaccacgcgcacatctcttctttaaaggctgtgctccatcggttgcgggatgttgggaacacccagcggtaggaggggaggttggacggcaggttcttgccgttggaggtttcggatgagaagagctctgaggcgaactcgccgccgtcgctgccgcggccgtgtaggaggatcacggtgtgtgtgtgtgtggtttggggtgggtggatgtgggatttggggaattccatgcttgcgagctgtttggatatgtgtttttggtgagttgggattccaatcggatttcggtgatgtcagatatgggggggttctcagctcccccgcaagatgttagatagcggttagcgatagcggtcagctaactacaacataaggtacgttatagacgaccatcttctgcagtataaactacaattcaagagcactctcctataacttttccttcctagctaatacccaatggaacccaacactcttcccacctccattatcctcttcccgatccaccgtaacctcatcaacctcaatcccaaacccaatctctttaagaaccctccgcacctcatccctcccccacccactccaatgcatagcgccctccgtagcccccaaccaagaaccattagtcgagctctcaaacgcggcctcggagaaattcgccagaagccggcccccaggcttcaaccagccgaatatccgacgcagcatcgtagtctgctccatgcgcggcagatggaaaatggaatacatggccatcacggcgtcgaactgctctgcgctgaattccagctccatcatgtcgcctaggatcaggtttacggagggagggagtcgctctttggccagggcgatttgtgtcgatgatatgtcatttgcggttatgctaatgtgggcgtgtgaggatagcagctgggtgcagggtacgccggcgccgcagcctagctcgaggatgttgagttggtgggtttcttttgcggagtggatggattgaaggaggaggtcgaggtaggagaggcgggtttcgtgcgagggttttgtccaggttaggtagactgaggcgatttcattgtaggcttttttgatgtcggatttgattttgtggttggtggtttcgggcattatggtggttatagtgttggatggtgaatcgattaggaagaaaaccgcgtcagctactctaggcgttctaagtagatgactcattcggtgatttactgtctataaggctaatttacgagactggtgattggatattctcttctgattgagtctagccaaaaaaattagagtaggtagctgtcatttatattaacatgaatctccccaactgtgacaccttactctctcgggaaaggccatttccagttgcgaatatgttcagcatcaataccattatcgagtgcctcggacctgcccgcaatctgctcattgagcaacttctctctcacgccatcggccgtgttaccaagagattgaaccgagtcaatggcagccatagcgagactgtatcgatcggttccattgcgcacagccagctcgaacggtgtgtcgatgttgcccttctccttgtaacctctcacgtgcaggttatgttgacccacacgcttgtaggtgagccggtgaatgagccaggggtaggagtggaagttgaatatgatgggcgtgtcgttggtgaagatggacttccatctcgcgtcggacaatccgtggggatggttgacaggggagatcaggcggaagagatccaccacattaacaaagcggaccttgagctgggggagatgttcacggagtagggcagtcgcggcgagggcttcgtatgttgaaacatcaccgcaggacgccatcacgacatccgggtcttggccttggtcgttgctggcccagtcccagattccgagacccttggtgcagtgcgcgagtgcttcgtccatgttcaggaactggatgtgctcttgtttatcggcgacaaccacattcacgtagttgacactgcggagacagtggtccatcacggacaggagagtgttgccgtcgggtgggagatagatgcggaccacctcggggctcttgttagccactacatcgaggaatccggggtcctggtgactgaagccattgtggtcttgtctccagacagtggcggtaatgaggatgttcagggacgagacgcgggctcgccactcgatttccaagctcttctcgatccacttgcaatgctggttcaccatagaatcaatgacgtgaatgaaaggctcgtagctgttgagcagtccatggcgcccagaaagaatgtagccttccagccagccttcacaggtgtgctcactgaggatctccatcacgcggccatcgggggacagattgccgccgtccttatcttcctcgaagtaatctcccatccagactttcttgcctgccttgtacacctcggcaagcttgttagactccgtctcatcgggcccgaagagtcggaagttgtgcatgttgcgagcgacgatatcacgaaggaatttcgccatgttggccatgcctcccttggttgttatcccagggacgatatcgttgaaaccatagtctcggaaatcaggaatgtccagcgggcggcgcaaaagacctccgttaccaacggggttggcacttatgcgggaggtacccgtgggcgcgagctccctcagttccggaatcaatgtgccgttcttgtcgaagagttcttctggcttgtagcccctcatccatgtctccaagaccttgagatgagcggggttttcgcgcacatcagtgatcgggatttgatgggcgcgccagaatccctcgaggaggtggccgtcaacctcccgtggagcagaccatcccttgggtgtgcgcaggatgatcatgggccagcgggggcggaagggaaccttggagtctcgggctttcttctggtatccccggatctcggtgacacattgctcgagtgtggcggccatcgcttggtgcatgctgtcgaagtcacttccctcgacaaagtatggtttccatccatagccaacgagcaaggaggacagttcggagtgactgattcgtgcaagcacggtggggttattgatcttatatccattgaggtggagaacaggcaggacagctccgtcattgatagggttcaggaattttgtgctgtgccagctggtggcaaggggaccggtctcggactcgccgtcgccgaccatggtcagagtaatgagattggggtggtcataaaccgtgccaaaggcatgagagagtgaatatcccagctcacctccctcgtggatactaccaggtgtctcgggggtggcgtggctgccaatgcctccggggaaagagaattgcttgaagaacttctgcatgccctgcttatcctgacctttctccgggtagacttctgagtagacaccctcgaggtaagactgcgacagaattgcgggggcgccgtggccggggcccgaaacgaacagaacatcgaggtcgtatttcttgatgagacggttcatgtgcatccaggtgaaagcctgcccggcatccgagccccaatggcccaagagtcgagctttgagatgctctagcttcagaggttcttcgaggaggggattgtcgcgaaggtagagcatgcccaaacacaagtacatgctggcgcggaaccaggcattcatcttacgaatggtctcagcatcgaggggctttccttccacggttgagcgagcctctccataggcggagatgctcatttcatccgggattggtgtcatgctgtgtaccactgctgaaccagacatgttgcacgatatgtcggggaaccagtccctgtgtatggtggctcctggggttaagaaagaatggtaaacactggagttggaggtaagacggaataagaacacagaggaaaataatttcaggacaaggcggactttttttttctgttaataagcgggacaattgtttccccctccgactgggagccctatgggccaacgagtcaatgacgtggttgtcatccaacgcacaagcttcgatggtgctacggcgcagagataagcatgcaatccgacccactgccctgtgcacgtgcattattctggcattcataattcttgggtgcttacgttcggtgcctgcccggtgaaaaagtaactaaaaatagcttatttatgcacagtgtaagtgtcatgatgcatcaccggagaaaccccgggaacattcgcgatcgtacgacgtcgccttcgccgtgaaaccgcctttgcccctccgaggccttaagaccgttaccccgcacccgacaccatgtgattcggccgagagtggggaatatcaagtgtcgatctccgagaatcatctcatattaagtaacggacaagtcaacagttggagaacattcgaatcaagtagcagaattcaatccaaaaagtcgcctctggtctcctccacaatcaactcgtactccggctcaaattgcatatacatggcctcgggagaacctgttttttgtttagtataatacgcaacttcatcatccaccaaggccttcagcattccttcgcttgcaccaatcgacccaggtgctatggctgactgcaccaagagctgagtctgacaggccctctccaatgcaataaaaaaggccgccgcttcggcaaccgtcccgcccgccgtaagcaatccatgattctgcatgatcaaattcttgtgcttagggcccagggcatcggcaatcagttgcccctcttccttggcgaaagcaacgcccccaaaagctcgatataccgaaagatcgtcgtagaacatgcaggaatcttcaagcgggaaatagtgtcagtgggaatgtggcgtgcgtggcacaggtcctcttaccctgattcagcatatcaattccccggccaaaagtactccaggctcggccgtagggactgtgcatatgacacacggcatgaatatccggtcgcctctggtggattgcggaatggataataaacccagccgtgttgaccggccgcaattcgccagtgatcttcgttacgcccgagacccgattgccttgttcgtcgacccgcaccatatcagagatcgtgagaaggccgaagtggactccgtatggattgatccagaacgtgtggggttcgatggggtctgtgtgtgcggagtggtgttagaacatgtacaatataggcgaaggatcgcgtaaagcaagcatgcatacctcgcacactgatatggccgctgctaccatctgcgaatcccattttggcaaagatgcgaaacgcgcccgccatctgcgcgaggagccattcccgttcgtcttctttgtcggtgggtcttgggatgtggtgcagcctatttacttcaccattgtcacttgtttcggtgttcaaagcagaagtgtttaaagcaggagtaaccggctttgctcgatctttagacacgtatgataacatcttgtgcgcttttgatttgggtgagtgaggaaagatggtgggaccgaggcaaataaatactaccccgcggaaccattggctattcgatgactcgacgatttttgtatatacaacctatcaaaggacagctacgtctgtattcgcctttggtggaatagaagggtctacttgccctattcgtatggtcctccgtaccactgtcggagattgtctttaattaactttttgggcggcagatttgacctggaggactccgtaagtggagaagattgtcatttccacatggctgcggctggacactagactcgagtccccgctagagatcatttcaattgaaaacagttcaatatgagtggtccaaattcaagaaagcaaaaagtccagagcagcgcaacatataatcaaagacaggccacccatctcgcaaattagaacagactgtgccctgtcgccagattcgggtcaagatgaggaaagtcatcaatcggacgaacacgtgcaactgggtagggcgcgttcaattgtgccggtgtcgcggtaggaagagtcctctggccctgtgggatcccagggttatagtcaaaaacccaaagacgcaacgactgatccggacaagttccagtatagaacctgtgccgcagccatgaccctaacagacgatcagcgccggcacgcgttgattgaccactctgaacacaagcggatatcgcttgccagtccggggacatccatttccgttcatcgtagctccacatgttgacttctatttctcggaatatcgaggtgactcggttcccatctgcgagataaagaactccgacgcccatgcatcggggcaaggggtatacgggtccactttctgcttccagattccgaagaacgttgatgtcgtcttcgaataggagcatatgtgtagccccggtgtcatccataaatgggaaatcaaagaaaggtggcctgcttaatggttttgggtctttttcccctttttccttttttctctctccttctcttactgcaatcgctggaaccttcgggatccgaagggcaaccctcacctaaagaggatgattagagagatcactaaagtggccaacagggcaattgaaagggaatagctaccattgtggcattcaaacgtggatccggttggcataccatcgaagccttgctcatgctaggcccaggcccgagaatctgagtatttgttttagtatatctatcgacacagccaagggtctgacacttacaccttcaacccaaaatcctacatgtccctcgtacttgtcatggacgtagcggtattcatcccagtggaaaggtctcggcaagcagagctggactccagaataccagtaggtgacaaggtccggattccaactcaattccccggatcgataccttgcaatgatggctttcaccgtactgaccatcttgtactcgtcgttctcccccgcgagttgatccaatgtgaatttgagatcatctacgcgctgtgcctcgggccaactcaaacctggctctctagccatcagtctcctgggtaggaaggagtaaattagtctctattggggaattcggagttataggatggctcactcgcgttgcgactgctttgcaatgaattctttcattttatgccgataaacatgaggcatgatattctctgcgatccgctcacgacacctttctatctgagctttgaagtcgctgcataaaaggtcaataccaagtatgaaaatgaagtgagccagtatcaactagctagagcaggttgaacttactcgggcatcagatcaggctcctctgggttccagcctttaggcgtgtcttcgagctctgtgatgacatcttttaccattggccatttctgtttcttgggaatttcttgtctaggcttcttccaggtcttcgagtaatcaaccttgagatcggctgcaagaagttcctcgtttaggagttgcgggattcccgtttctgtttttgccttcttcggggcagctccttcatcttccttcaagcttttcttgcgttttgcattgaccctcttgggggcacttttgccgtcaagttttgcggcccgggggagagtagcccttggaggcatcttgcaacagaagatagtcacgaccaaggtgctttctctatgtaactagcaggtcgaatattgaacataaatgaatgatgagtatgaatgacagaattttgagggtatttgtattccattttgtgtacgccgagcccatcgcaccggactggggtttgactatgctgtcaaagaaaacttaaaaggtggtaaacaagatagaacaaagacaggagcatgcccttggagagaggtcgattccacttttccgtgcttttgaaacaccttattgagtgtgtttttgcaaagtatactctcagtggatttgactattgcaaagtatactctcagtggatttgactaggacgattctccaatatgattttggctaatttctttgatattgacagggcttatgctgtttgctgtttgtttgggctctgtctgtgcgaccttctgccgctgtacctgatgttaaaggattcaaagcagcaggatttgtcaaacaaagacttgtggattcaaacccaaagttcagatccttcactcggctcactttcaaaatcatgaaagaacattggctaacttgagctgacctgtagtcatgagaatgagagctgaaaatagattgtggcgcgataaaagacacgtctcagggcgagaaagtgtagaggctggagagccatggagaacaaagaagatctgattcttgccctgtttatttttacacaactcggtatctttgcccagtgcctcacatatgtgatatattcctctttattaagtattttcttatcgtggagtgggtaagctgttgagcctcagtcgcacccatactgatattattgagcagtgctttgttcatcgccagagatgcttgtagcgaaagcctgctgaagctcaatgtcatacctcttcttatcagcaagtttgcctatcacgaatcttggcaggtcttttacccagtaaaagggcatggtttcaccaatttcatcggagcgatgcttagacaacaagggctgaatatgcgaataaaacagatggaacaagccggtcgggctggaaaggccagggaataccagaatgttccagttttccatgcttgttccataacctctgatagtagtaatggcgtgctcccgacctcttttgacaggatactgctagacatttgtgtctcctcactcttcaagatagacatcatttccttgcgagcttcatcaaattcatcgacttcgatcatgtccacagctttattagtcaaccagtaaggaggtgcgaccatttcgataggtagggagcaagcccattccagatcgaccagacaagtgatatgccacttgtcatcaacaaaaattttgctttggtggagatctgtaagtgtgagaacaaaaggcccacgacacaaatctcgacgaaaaaacactggaattagagttcgcattgctgccagtgctgacatctgataaacgcagtcatgtatgtcattcacggaatttagttggtttcgtagacgactgtcatgggctcctaggatatccatcacgtaagactcaaccgtgttgtatgtatagtcacgggatatgtgggttggaacgttctcattctcgaggtcctgaagttccatcgagagaggacggttgcttagagttaggaacccgtccctgttgatgatggatgaactaatgcgaggcaggggggttttgctgaggctcagaaagatcctggacaagtcccggaggaaattacaccgtaactcgctgtcttgttgtttctcggaccatgtattcgcaagcattgtcccttgggtttcttcgatgcattgtagcaacaagtatccagcactagcaacgcgaccaggaagcgcttccgtctgatttggattgaggatatagttcgaaggtactgggaggcaaaaccagtttagtagccggcggcgtagggattggaagcaacggcccggaaagggcagttggtccaattctgtgaactattctcgacaattagattaatatattggagatggagtaggtctcgtacagtttcacctgtagacaacgcgaagccatataaccgtggaattggaatatccgggcaattctgctggagccatgcataggtcccagcttcacattggatcttttcatccccgttcccgggcctaaagtcatccccgatacggtaggggagcggaaatcggagtatgacccgttttcttggttgctgtctactgttctggatagagataggaatgcagatattgaaactgccacggagccagtacctcacttctgaaacatggcacttatcgcttgagctcagccctagtggtgagcaacagtagctttcatccactcgcgtctatcgtcgagatatgaaaagaagcggtcttgttggccatagtagcccaaatggtggagtatgtcactctcctgatccttggcgaaagaataggtaatttctcccttgagaaggcggcgcgtcatgattgggagcaaaccaaggtgctacccggactagtattgactttggctgtgtccccacaaagcagagttcgtgggtgagatctggggaaggggcgatcctcccgggacggacagatgttttgccgaagtagcgaatatcatcagccttcgggcacctgacagtcctggaggtaagcttagttactttgtttctctcaaaatcaggtgttaggacgaacacacctcgaaatatatagtcagaatgcgagattcgttgatttgcgaaaaagctataaaaccaaaagtcaaccctaaacacaaagccgtatatcttgcgaaaatgtaaggacgttgcgatacgaagtttagctgtagttccatatctcgattatatgcaatcgatgcctcattcaagcacctttgcaggttactggtagcgtcaataatctcacactgctggtcaaccgattggccgattcagtacagtacccagaacaggcagttggttattgcatagcgtcggccctaaatgccaaatctaaatatcaccgttttcatggtagtaaagtaagaagaagcatcaaactagatggaaagttacataacagccatctagtatacaacgcattcataaaaggacaggatatcagctcataacaaaccaaccaaaaattgcaaaactccgctaagcaaagggagtgaaaagtgagcaaagtctaagagaacaaaaccaaaaagtgacaacattctgagattatcgaaagcaaaaagcgggagacattcagcttctcataaagcaactcataacctatattcaagacgaacgggagcgctgagtcggcggagctcccaaaggctcctgtattgatcagtcagtgatgaaacctcttgaagattcttttgcggagtaaagtacgaaccgagctggcacgacgcttgcggccgcttcgttcttcgccgacgttgtcagtctcattctcagacctgcgagcctcgcgcccgacgcaaatgctgttgtttcggccgttgacccggatgcccgagagagcgcgaatgttgatgggccgggggtagcccacatcgtcgttcagggcatttgcgcggctcagcgcagcgatgatgacagccgccatagagttaatacggggggatgttggggcctcctggggagttgaatcagtgggagtatcaactccagaaggcgacaccatgatggtgttttcgtcaccagttatggtgatcgagttgtcaatgtaaatattgattggggaagcccatggctcgtccatgtcgttctgatccacgctcatgacagttgtgccgctgggtctggtcacagacaacgtgtacgggggtggagctgtgcctagagtggacgtagaggcagacgtagatatagaagaagtgttgcgatttgcccggacttcggcgagcttacttagatggtgtcgcaaagagtctgatggaggcaacattgtgaatgaagttatgatactttttagtcgtgtttgtagatatgaccagagtgaagtatggctgagtgaagaagagaagtgcaacagcgggttatctgagtatttatggtcaagcgtttgttcattccgtttgaatgggcgcaaacaataggaaaagtacaatcaataaacaatcaatagacagccaatcagaggctgtcaggggccattgacttgcctaattgggagccttgaatggatttctattgttctcaatagagatcacgtgactgctattgttcatggggtatcaatagaagaaaaactatgtacctggtaccttcgccaagatgggcaccaccgtaatcaagaaggtacatgtacatccagtaccatggtttcgctagtgtagaaaatgcgcctccaattgtcttccaaaaaagcaaaccgggacgctgcggcggtccaccagcccctgactgtggagcagtccttcgtagagcgtgtttgtgtcactgtaaccaaacgaactggatcccagatgatcggatgttccttcttcggccggtcggaaatctctgctgatggctacaccatctgggaagtgggcacgtctggtcaggttattggctggtatttcacaggcgcagggtatcaaaccctaccgataaggttgtgtggctccttactgctagacgggatatcggagccagagtggtctgggtgaggttggcccgggtagtatcgaccacctgggtgaagtgattgcaccgtctgcaaatacttattagcaaggacaacagcccttgtagattgcccgagttataccggtgtttctgtcgcgtccgacatccgaaccgttacgggttggtactgacttcgcggaaatcatccccttcaacttccacctcgcgatctcgaatccggcgcatcaaagccatgaaattgctttgttggaatttttcacttgtttcgttgcgcacgctgtcgagcagttgccctgctgtccgcgcaagttcatcggcatctcgattccgtgtttctggatcctgcttttcacttttgggaatgagatccgatccgagtcgaatatgctcttgggtaactggctcaggaatgccgacttcattggtctcctgcgactgcttctgagtatctagttgagcagcatcgactccttgcaactccatatctgcccgggcctgatcaaaggcagcctcaaaggcggattcgtcaaactgttgcatgtggtgttgctcagtctgcataacctgcgagggctgcatctgattcatggaggatccatacatctggtagcttggtgcaaaagctggttgataggcaccatgcatttgcggggtttgctgtgtctgggacataggccctcgttgttgggtcatgaattcagagtgccacccgccatgcgccgtggctggcgcaatatttggtctttgtagttgcgctacagggtgtgcgggccccgagatttgcaagttctggaagtccgatgcccaactggcgttggctgcaccatgtgcagctggatggtgtactgcagcatgatgtgatggtgctccaaaatgggccggatgttgtaagttaggcaatgcagggccagcaaagttgccttcgaatgcggcgaactccgggtcgagtattccttcttgggggttctgggatcggaaaccctgtagtatgcgtttagcatgaatgaaacaatgcaatcccaaaagagctaccaacctgagcaggcgattgacgggaagtcaaccggtcttgctgaagggtccgatcaacagaggtatgcttctggaagttctgaagggcgttcgacggcccgcacagcgcatcacccataatgacctgcttagatcgaccaactgagcaagaaatgtgatatggtgactgtggctttcaaatctctctgtaatcagtttccaggacagattgcagcaaatataggaatgaaggtgtcggacttcaaaagaaactccacgccaccgcgtcgtggggttaccgatgaccgaggctcatcacgtgcatatatccaggtaacgtgacctagcacacgataagatacgggaagggccaggttgtttggctaaaagggagagagctaccccgactccgcgcgctttcacagctattaacttcttgtttgctttatttattcaacatggtaactaatattccgccacattgctttgagcttgttccacaatcccatcgctaacagcttcaaacctccaggcggcccctcaggtgatctcgaattccggacacgaagagatgattgtatgtgctaagataggaattgcaactggtgatctatgtggttacacaatgtacgtgagctaactacgtatgttgaatagcacgatgctggcttggactattacggccgccggttggccacatgttcatccgacaaaacgataaagatctttgagattgagggagaaacacaccgactagtcgatacactgaaggggtaagctagtcctatcgatgtgtgcaactgggtgttttgtctctaacatttgtggttgatagccacgagggtgctgtgtggtgtatcgcatgggtgagttgacaccaaaacatgagcaattatagtgcgcaatgtgactgaccatgcgattctctcgatttaggcccaccccaaattcggcacaattctagcctcatcttcctacgatggcaaagttctgatctggcgggaacagccccagaatgcgacctcgccctccggtggtagcacatggactaaggtcttcgatttctccctccacacggcctcggtgaatatggtttcctgggctccccatgagagtggatgtcttcttgcctgcgcttcttccgacggccatgtcagcgtgctcgagttccgtgacaacaactggacccaccaaaccttccatgctcacggaatgggcgttaactctatcagctgggcccccgcggcctttgctggtagccttatcagctctaaccccgggcccggccaacagcgccggtttgttaccggtggcagcgacaacctggtcaaaatctgggagtataagtatgtccattgataaaactttccaagcatacagctgtgacgtgaactaactcgttctttagcgcggagtccaaatcttacaacctcactcaaaccctcgagggacacactgactgggtccgtgatgtggcctggtccccgagcatcctctccaagtcctacatcgcctccgccgcgcaagacaagaccgttcgcatttggacctctgatgcttctaacccgggccagtggtccagccaaacattggagttcgacactgttctgtggcgcgttagctggagtctcagcggtaacatccttgccgtcagcggaggtgataacaaggttagtttatggaaggagaacctcaagggggagtgggagaaggtcaaggatatcgaggagtagtggctgttttaatttctatgtgtcatctattcccttcctcaacgcataattctgttctattcaaaagctccattgcttgttaccataaatattgattccagcgaatcctacgcaatttccagagctttgggtgagcttgatatgtttcattccctatctcgtccatctcgtccaccgctcaactcccagaaaaacaaaagaaagaaaggcattaaataaaggcaaatcaaggcaaataaaagagcaaataaaaacgtagaagatatcccgtgtgtctcaagatcagcgcatgactggcgctagccctcacacgtcccagaagatgaatgggcctctggcacctgtttccttcatatccaaccaccgtccaagcatcaggcgcccaccggggatgataacagcctcataaccatggatccagccggggccgtccattacgaggggggaatgcttctcttcatcatcttcatccgcttcggcgatgataaaacagatccgcatccatccctcaaagccaccatgtgaaacagcaatctcttcggtaaacccgaatacgtggtttcccgcctcatgggcgccactataggctctctgcttgccatcgaaatatgtccgtttgatattgcggcctttagcgagaggcatgatcttactgcattgcttgggccaaaactcttcggaggttgcgaggtcaagggtctgacatttgttaatatagccttgcaagaaactcgccttccactcaccatgatctcgaccccgtcaccgtgtgtctcaagatcagcgcatgactggcgctcgttgtcttgcaggtctgatatcggatgcatgcatgctaattgaaatttgaaatcagctcggggtcatgattgggttttccccctgttggtatactcacagtagtatcctagccacgatgagcttagtttggattcctcgattggaagctcctttcgtgtcttgggcttcatctctgcaggcagcgcggagaaggattcctggaaggtgaactcggaggtgttcaaaagatgacgttgccagaaattgcgcaggttcagcagtttgacgagatcgagctttttgtggtcgatatatgccttgcccagcttctctccatatgcgtaaacctgtttgatgtcgtagtcggttcgacggcagtgatcggtgatcgttggatcgagagcaaacgcactcaggctctgtgtatggatatcagtgaatgtccaatccattattcgacgaaacatgcgtacaagctggagaccataaaagagttttgaggaaggttctttctgaaattcgctcaaaaaatccaccttctcgagtttctcctgtatgcattgcagggtctttggggtcgatccaggaacgatggttagttgcagagactcctcgagcatagtctgcatgacctccatccagaggaattggcgatcatcttccttctctttgaatctgatcgtagcgcccagcacaatggcacggatttggtattcgatcttcaactcccctgaatttttccccggaacaatatcgtagtgtttaccaaagagatatcgccagacggacgagtcggacccgaagaccttgttccacatctctttgcaagactgggagagatggaaaacatcacgatcgttagggagatagcatgcaatgtcctggagaacctgttgttctcaaacattaatagctgcaacctagaactatagacatatacttacctcattcggaagctcgagcagtcggcttggagcacttggcatggcaactgaatcggaccgcacggggttgttggacgacatgtctgtagttgcggtattattcggtatgtatacctatgtacttcgatgtgaggcggaagatgtgaacagaagacgtatgtgcaagaacaaaattcagaataaaaggcgatagatattcggcgcgaacgttcatgtatagcattcggtgtgtttgtctatgcactttgatgtaaggtagaagatgtatgaagggaggatgtaagtgcaaagagcgaatttcgaatcaaaggcgagaggtattcggcgtgcgccttcacttgtccatgtggtatagcatttggtatgtatacctatatgacgtgaggtgaagatgtgaacagaagatgtaaagtgcaaagagcgacctaggaataagaggctacggatagtcagcgcacacgttcacttatccttatgacatagcattcggtatgtatacctatgcagttcgatacgaggcggaagacgtaagaaagaagaggtaaaggacgaagagcgaatctgggaataagaggtaatatatattcggaccgcgcgttgtcttgtccttagagtgattcatttcgaatatgcgatatcatttttgatttcagttcgaacatcgggacaatatgggtccgcaactaaatcgggtgaagctacttatatttgcgtgatgagattcgcctcacaagtgacagcgcaacaataaacgataaagagcgacaaagaggtccgcggttcgaatttacctcttcacgttccagagattgatagattttcttcacacgctatatatgccgtgagaggctatgtcgctgtaagctttctttcacgccccagccatctgctaacaggcccttgacttcctctaggctaagtccactcatctcggggtagattgcccatacagcaacccatccacccacacagacgagtgcatagagagcaaacgtccatgagggagagatcaattccatcataggcaagaaagtaagaccgatgataaagttggatccccagttggttgcagtggccagtgctgaccctagggaacgtacattcagagggaagagctcagactgctgccaagggacgttgccgagcccaagggcatatgccgccgtatagacagtaaggcaaagcagaattgcaaggggcacaagggaattagtgctatcatggttttcttggtgatcagttggaggttgtggattccatttgccatccattgacgagaacgagaaagcacagacgaccagagcaacgaccatgacaggtattgaatacaggagaatgcgccggcgaccgattctgtcaatcagcacgaatgcaagcagcgtgaagataaagttcgtcatagccaccgagagtgatgtcagtgtcggcgacgagaacgaaagagaggagaagatggttgccgaaaaatacatcaagctgttgaatccgcagagctgttggactgcctggagcatcattgctatgatcaatgctcttctatttccaccatgcaacaactgctgaccccgttggatggtatcatgcaaccactggggctttgtgccacgagacttaactggtcccatctccgacgcctcttggacaatttccgcgttgatattgcgcaagacatgatccaccacccggtcacatccagggcaatcctgatagatcttggacaggactgtcttcgctcgggcatcaaatccagcctggagcagccatcgaggcgtctcgggtagcagagcgaggatggcgagttggaaaaaggccggcaatgcaccaattcccacaatccaccgccaacctccagttgtactagaaaacagccaaccgactatgtatgccaccacctggccaccggtgatgaacagactgaggatcgtcacaagtcttcctcttgcgtgtgaaggagctaactcggatatatacctgattacctagcatgttagcaattaccatctctcttgtaatcaaattgatgccatggcacaggttctcagtccccgcctgacgacaaggccaacctacaatggagtcaccgcactcgcgctaccaacagcaagaccaacaatgctgcgtccaaggatcatcccccaaacctggcttgtaaaggcctgtaccaatgctccaagtgcaaacaacagatccgccccaagtatgactttccgacgaccaaacttgtccgccagcactccggtgaacgggctcgcaatcaacgcaaataagctagtgcatgatgtaatgaggcttttatcgagtgttgtcaatgttcggccggaaaggtctgacccgatggtcaccaaagtagacgagataacacctgtactggaagtttcaacgattgttagtgaacgggaagcaatgaagccggaacatggcgtgtttggtagtagctagcatactcatatccaaatagtaggccgcttatcccagcggaaaaagtcaacatccatatgaaccagcctcctgagtattccagctcagaggccaggctctcatcgtggtcattgccatcatggtcggaataggcgtgggatgaggcgagcaaaggggcgtgggggcccgattggtcttgctcatctgcgcctgtcatatcttcgagctcttccaacttgatcctgaggtatcatccgaattttcaatgttatgcccctgatcccccgaggcatctgagatggtaaagtgacgtccggggctaatcgcgataagccgataaggagacgctcaaagcccgaagcggaactcggattccgcacgtcgatacagttcaagaacaactagagatctatttccatacatatgcactaggatggaatgaaggcctaatatatgaatattgggttgcagaatactaaaagtgtgtaatttagattcatgcaagattcattgtttttacggcattaatgtatacatatatagccctcctagcctagtgtttagccacaacaccggcagaatcagcctgtgcgctgatcttcttcttgtatgcactcacggtgccgtcaaacttgtgaacagtaccgccgtcgcaaacccagagactagtgcagacattctgcaacatggtgacatcgtgggaaaccatcaccacacctccctcgaacgcccggagtgcatccgacagagcatccataccctcgatatccaagtgattggaaggctcgtcaagaacaaggatatggggattggtcaaggacaagcaagcaaatgcgacacgagatttctgacctccggacagtaattccatacgttggagaccagttgtaccagtgataccaaatctataatatgaaattagtcaatgcagtacatgcgagtggtcaggataaacttacgctcccaggtgtcgtcggtactcctcgtcggttttaccgggatatgtcttggtcatgaagccgactgcactggcattcatgtccaaagcatcgacgtgatgttgggcgaagaatccgatgcgcagtctcgagtttgtggagatgataccgcttgttggctcaagctggttggtgagtagtttcaggactgtggtcttaccagcaccgttaggtccgacaattccaatacgcgaatcaagttgaacatccagatcgacatccctgagaagaggtttgtccttggtgtagccgaagcaaacatcagacatctggacaatgggtggtgaaagcttctcgactccagggaaggcaaagtgaacggtgtactcggcctctggggcttcgagaactggcatgcgctcaagtttcttaattctcgactgtgcctcggaggacttcgcggcgttgtatcggaacttatcaatgaatgctgatgacgatcgttaacacagctacgacaagatggagggggtaacgaaccttgcaagtgagctctttcgcccaactgcttctcgtattcacgcttagcagtcttccggcgctcctccttggtagcgtagaaggattctgcagattgttagaacaattcatagtcttgagatctgatgtaacttaccgaagttagcacctctgtagtagtccaacctctcagagtgctggtggataatatccgtggcgacttcgttcaagaatgcacgatcgtgagaaaccacaaggactgtgctagggtatccctgaaggtaattggaaaggaaagtaattgacggaacgtccaacatgttagacggttctgtgaaatgtcagtaggccgcttgtagaatagagagcagtggtaaataccgtcaagcaaaagcaaatcgggctcgcagaatagagctcgtgcaagagacaaacgcattctccaacctccggagaaggtcttggtggcgtactgctggcgctcttgggagaaaccaagaccagccaagatactagccgcacgagattcagccttatcagactccatttctgagagctttccataaatatcgctcaaggtgatatccaggccctcgcgctcctcgtcaagtctagcagcatcctttgaagtatccgccaatgaagacctttcttcttcgatggctgcaagttgttttgagattttctgtagtcgttagcaatatgccgctgtgacatcttgggacttgactaaccgcttgctcggataggagatgtttccgccacacatcagcatccaacactgcttgcaaagctggtgtatcatcaccagtaatctaggatagaaagtcagtaagagaaaaggcaaccgagctggatttgaacatacctcttgctcaacgtgaagaatagaaacgtgagtcggaatcgggatttctctgcgactcaaagcacgtaaaagtgtagatttaccgataccgttctgaccaacaagaccgtaacgacgaccataagcgagtgtgaaggcagcgtctgtcaaaatgcgcaggccactaatcgagatatcgatgttatccaacttgatatccttgctcttggcctgggagtccgagcccaattgaagagggttgacagccatgaagaactcctcgtaggacatagcctcgtctggctggttgagcagacgggacgcctcgtaggtaacgttcttcatggacttcttgtcctgcttggcgcgaatcttgcgctcggccttctcgagcttcttcttgtccaccttggactccatctttcgagcattggcagattccaagtcgacagtgtttccagtcagacccagtgtagaagacatgttccgctgcgcaccgacactgatagtctgatcaagctttttagccttgaagggcatttgcctccgctccggatctccatcggaagagctcagcgtcgtaatgaactttgcaactaagttgccgatcgcttcgtagttttgcggggagaaatctcccgaagcggagactaggaggttggtcacggattcggcggcctctgccaagggcgactcggcactggcatcgtcgacgtagaggtttgcggcatgagtcaggtagccctgtcaaatagtcagcttcaactcacaatccttcaccgcgcatatgtgcggagagacgtaccactgagtattcggtgatgatgttgtcgatgccagggatctgggattggagttcggactccatattgccaggctcgaaaggacgtattccacgccgggattcggggagcttcgaggtcaaggttttgtggagttctacaattgatgtccccaccgtgaatagtggcggatttttgtatgtgttatcgataagatcacatgatatgagtgtttatcgttcataatatcctcggaaagcttcttatgttaattgtctcttgagataatgtgacagatattgaatgctaagtagtgtaaatcatattcctagctttgagaaacaccaaaacaaatgagaggcagctaggtagtgatttctcatatatttgcgactactacactccataactaccgaaatataagcgatttccataacctcaacaaagaactttatgaccatagctttgtttcgaagtacttgatattcgaagcaagctgtcgaaaactcaatctagacaaaaatgagattgaaagtagtttgctggctgtatatcgccaatcttcgcatgaagctgttgaatacgaggatccatctatattattagcatcagattcccagccaattagttgattgagcacagatactgtagccaagttcagaatgacctcttggcatttgtgatatacttgcatacgggaaacaagcatcagatcacccgaatgtcacacagccccaatatttgaagtccttaagcgatagacaaagtacagagtagacgtagcatacgggcgagtagcataatgatcagcttagctcctgcggcctctccggtcacgttatgagcaatacgaggttttgcgatgatggacataagtaaggttcagatctgaccctgttgcccaaagatgtttcggctactctgtgcagctaagagcgatagacatagacggtgaagtggaagatatggcctgactagattactctgcatcaatgactggactctgatgaaattacttaaattagatggctcttgcaggcaggttgtaggtgtttcataagcagtttcacgttcggagaaactgcattggaccaatgagcagtaggtgaattatgaacaacgcagaggtatcggttacttaattaacaatcaactgcccaatgaacctatacaagcttagaatctggaagctgttcaaaacgcaatttccacccttcaccaaggtcggaaattgcaaagcacgggcgtgcaaaatcggccgagggtcggaaggccgagaattgatgtcaccagggctagaggtgaatggcatctttgtttattatgtgattcttttccaacaatggtcagaaatggccattcgacctggatatttcaagatcaccaacagtgcagggaatatcttgttccggtctgcaggtcgctgcagccaacactgatataacgggtgacgacaggtgagaaaaacaaattaaagtattgggtcatagttacttatgaacagttgacacgggatatgtaaacgtaaatcaaggaactgtccggatggacgctccatatatcgaccttcctaagtgaatgattggatctgccgatcgctagaagttcaggtattatgtagggatcggcctgaaccgcctttcaggtgaaaaaaaaagagagttaaagagcttgaacacgaggtacttcttcccccgctatttgagacactattgacggttaactgccagagctagaagtatgagtttggaattaggaattgtgcttcatcaggttcctttgatctgcaaaggggaaaagagagaaaaggggacttttatatatagtaatgtccccaaaaacaatagcaccgggtactatatcgggttaatttataaaatcgaacaggtcaactcttgaacctaagatcgtactctaatcttcggaccaaattcggaattccaggatcacgctcttcaatatagcaatttaaaggtacggggtacctgctggagcccttgcattattgaacctcctcgcaacgctttcagtccattctttgtcggatatttaattccagaagcaaagtcagcaaagtcagcaaagttagtaaagttggttggaagtggatctggatggtgacaaaccagcttttcactcggcacaaagtataggatgacagcttaaccgagttgatagtggatagattcctgaacaaagcctaaccgatcatcctttgatccattgttaatctcaatggaccatggttcagtattagagaacggaacacctgcgggctattcatagccagtggacaccgatcggcttgagggccccttcacgatgcgactaacgatcctaggctagggggccgagaacgcaatctcagccagccaacaccagatgtgtggggaattctggatcgcatggctttttttggggcctagtggcttctccatttccctgctctttagggtgctcggccagtcgaagcggacttctccggttgcttgaaatgtctggactatgacgccaatacaaatgtgagccgcaagggacgtctgccaaattggcgcatcctcctctggcctgcattctgcatttgcaacacctgcaggatcgtgcaccagagctagtaccgtttcgtgctgccctgaagtgctgtgcaaatcggggtattcctctcctgtctgtagaatgtctggtttgttttgatagcagaatcttccctagatcttcgatccccggtgaaatctttaaatgaatgccatccaaagacagcgacctacttcataattgatctaagatcaaataaatcacaaaaggacccaaggagggggagttattgaaagttgctcctagcgtgcgcagggcgggagttgataatccccgtgtgttgttgttgatttccccgggtcacatccacttcgtctggtgttctccttctttactcggcctcccagggggtagaggcatattatttttcttggaggctttgctcggcgttggccattcactctttattttttaattctttttcctttgctttgtctggaacgtcaatcgcggcctgggtgaggcagcgcagcacttcttcatcaccacccggcttgcgcaactcgcaattcgccattcgacctttcatctacctcttcatcgtttgcctccatactcttttgtattgtgcatccatctggaatgtcattcacggagcttatcaacctggagctgatcgtcggggtgtttgacatccttagcggcgtcctctgaggatggatcacatctcaactgtaagtccccgagttgatatcactttgcaggacggcggcctggtcgcttcggaaccttcactaactagcatttttagctctgtgcattgagcacagttggaatagctcccaccggtcttgcgctcggtcgcgccgaacggactcagaggcctgggctctttcggcgaaagactctctttcaggatatcctcgagccgctccctaataacagtgaacagacagcagtcgcccggcccaaaaccgctctctcatcccgcagtccggccgccgagtggcttgccgcaaaggaacaggaaagcttgcagggaaaccaagaatccaatctgcgaaaagcgcccttgtcgttcagcggtgcaagacgccgccgtcggggtcaaactctcacaaacccacccctgcggattccggaaaatgagtcgactgactcgccggtcgaaatacaaactcagcggccatcctctggttggctgcggcggctgtcgatggcctcgttccaagctgaaaccccgactgcaggtagtccaacaacgccctcgttcaatgggtcagaaagcccactcgttcctcgctcgccctatctgcgaagaaccccaaacaaattggtgaagcgaccggcttcgcaacatacaaatacgcatgctctctgcatgaaccccatctctgaaccgtcgccggctgcgctgcgcaggcccgccactagtcaccagaggtcggagtcgatgttcctccggacttcctctacaacggacttcaatgcatactttccgaagacgcctgtcgaaggtccagcaatcgaagaattcgagctcgaaaagaagaagcactggatgccattcttcgttcccaaagctgggaaattagcagagaggctttcgcgcaggttctcgacctccactgccccaaaggttcagagtgtacgccaaattgcgtctgacaatggcgctcttcctgtgttggttgcggctaatatgatctcccccacggctgctgcgccagaagacatatcagtacctaataccccaatcgaattccgcaatccgttccaaatgcctatctccgagccaactcccaaggagtcggtcgccccggaacagcaaacagcgaaatccggccataaacagtcatactcggttaacgatattgagccgaaaatcatcatggcaaacacagtcactgcccacgggacaccgattatgggacccgttcgcggcggctctctgaagcgagtgaagggaaggaccttttcgatccctgcctccgagctctcaatggaagagcagaatgtccctattccgaactcctcggagccggagccgcggcgcaacatcactgatccaagcgtgtttcgtgccccctatcccacttcgcaatctggttgggctgactcggctttggaaagacggtctcaggttggtccccgatcggtgtcgcaggactacagcgttggcttgggacctcgggccggtgcacgtcaaatgacctcggatgcggtcgccctgtcggcctggcagcaggcatctcgtcctggtggtcgacctcatggttcccttcgtcgccgtccgaagggattttcgatttcatgttccgatccggcttccaccgtcattggctccgatgacactcaggtgtttacatcgtgcgatggatatgagacggactttatttcagactattgggactctgtccgcacacgtgaaaccaatcgcagtggactgaagggactgcggattgagacgatgtttgacaaggcaggtacaagcttggtgaatgaagaagccacgaccttggagtctctcctcccgcggggctccttcgccgctcggtcttcggacaaggatccccaattattcactgatccgcttctgtcgtcccctcctttggttcaaacatccatggttgaaactccgttcgtggctgacgatgatgctttcagcatgattggagcgcttccgagcaatgatcgtgattgtttttcatcttctctgacctattcattggcgaaattagcagagcagcccgactcgggcactggtgcagctaaggatatgtctgaatcggtgggtgacttggagtcggatgtcaacaagaaaacaaacatctttgactggtcggaacacgcgcaccatacccgcgaaacttcagactctgaggcgcgtcctaagactatgcagggaaaacaagagggggttgttgataggagccgggctgtttgccggaaagcaccatccactgtccaccttaggagccagagtgtccctgtcgccagtgaacttcccatcaacgaatcacgtcaaacttctggcaagtttggtacttggggattgggaactaaaggtgtgagtgaagattgggacagcgattttgatttcgacgaggcggaggacacaccagtcgccgaagacaaaccacttgttgagcccgatatcaatcgccagagcatgactgttcccaaggccattctggagcgtcaagcaagtcttcgtggtcaatttgggcaggttcaggaattaaccatgctggtggaggaattgaaacgtcttcggcatcaggcaaatgtcctccgaattgtcaacggacctgccagtgaattgtgggcagaagcagagcagatcgtgaaccttgctaccattgatgatgatgaagctcgtcgctcgccaccagggtctcctcaatcccttactttcagttttgatgaatctgacgatgatggccttaatgggtcgtccaagcggaacagcgaagtctcctgggacgtgcccagtggtgaaaacaaagccatcttgcccctcgctcagctcgtaaaggactcccaaaagtccaaatctgttcttgatatcctccagcctcgtggtcaggagcccgctttaggtcttgacgggtcagaattggcatcacgcggaaagaaacttccgtttgatacttcctcgttgaagaatttggtggttcgtgcgggtgtggtgacgcgggcgttgaaggaagttattcgcaaagccgacggggtggcagacagccctcaggacttccaagacccgccattccgacgcattttcgacaaaccatcccacgatgatattgccagctttgaggcagcgctggctgacatgtcctaatcaacttttcttatcttttccccaccacatctcaatactcactccctctcatcatcttctatccgccaaccacaaccatgagacgaaccgaaaaacacctcaagatcatttggatgaccatcttctccatccctacctaatgtttacacctgcatgatctcggagaattccgtccatttctttcacagtgcgatctgactcaaaacgccattaccctttttccattctcgtgtacaactcttccccaatgtacattgccaagaatccggttttccctttcccaccctttcatgtgtgcatgccacatacgagtgcccattgggcccatgaccattctctcttgcgtcatcttccccttcctttcgtccatgttccatatttgcgcagctcatatttcctaattgcgctgtatcactcacggaggatcccttctacgggatgatcctggtgttttcgaacgaagatccccatatcaggcaagatgaaaagcgatgaacttcagacgcgatgattaacccggggacgagcccggaggacaaatctatgaactttcaatcctgtgcctaagcctaatacagaaatgaaacaaaccttctaatctcatggtccggattaagcaatcctgaagtaaatctacaagagaccaccgtcctggacagtatagaggagtggtgtctaaccccaagaagctttcgggcagctattgatactcggtgccagtcgctttgaaatgtggtttgggaaatatatactgatgtccagataagtcgagggttgcttccttagacaattggactctccacgagtcatcttcaatttctacagtatatattgaactttgaataaataaggaacaggtatatcttccagttacttatcaataaggtccgaagccagatattgatgtgcaagaacagacgaatcctcgctctgctcaacggttggagctgatatatagatacaagtataaaattatgataagatttcagtctagaacgcagcggccatcatttctctacagtatataaattaagtatccgactagctccgaagttatttagctctatctgatgagttcaatagaggcgttttgtggctgtacaagccctgcgcatcacctgggcggacaagataaacaccattagagtaagacgtagtatagttaatccgagtattatccggggcactaggaaatgaaggggccacaccggtgttccatgttgaggagatcagattcggcttgtattgatctattggtgatcaattgaggtcttggatgtatggagtatgtacacattaagcattagccaatgtcgatgtccttggcatagcctcataggaacatatggagtatagaaagaaaagaagaaaaagaaaaaacggaaaagagaaaacccctgccttacatgagcgatacacgtcaatacgcctggacggcggtaataaaacccaaatacagccactcgtacgttacccaccaggccactttccggttcaggggcagcccgtcgctgattggctgacgagatagcgggttcctctatcttgagctgcgctactcgcctggtccccccaaggcgtgtcttaccctcaccttgcttggtgcagtcggcctcgcatgggggagtatcaacaaatagatgaaaaaggcgaatgatgaacagagcagaataaacacagatccaaaccgagacaaaaacaatggccaaaaaacagggtgttctaaattaagactcaggggcgagatgcggagatgaagtacctgtacaatacaacaagtctcctgtataatattggccgctagtccgctattctagaactcaactcttctctccttctcctcttctctttctctctttatccgacattcattcccttttggctgctggccgccgctcttttcgaggaccccccgtcctacacactctttttttacattgaccttatattgcttgtgacactcttttttaccagctattccgtgattttgcaattgtgtggcccccattttaaatgacgagcattaatctcgaccggctatcgcctttttaaacgtgttgaccggtcctcacgttcccaagtcgggtctattcctatagaccagactacaccaaccatgtctcatgccggccacgcccgcctggcgatgcggaatcacgttcgtcgggatgtcatcccttcacatcgattgccattcctggtccccactacctcctcgatacctaccaagctttcatccatcgtggctagatccgaatcagctgagccgacttcaggagtaaagcctaccagcgacctgaccacgacggtcttgccggttgtgctcggtgctggtatccctattttgtgcgctattattatcctcattgtgctgcaccggagacatgtcaagaaacttatgcgggaagatgcaatggataaacataaatctctcgattttggaatggatacagtggggcctgccaccagcaggaaaggaatgccccagatgtcagaacccactcataccaaaggattgtctcttgatgtcggtccatatctgttgcctccgggcctggaaggttccccggattcgctacgctccttgtcaatagacgatgacaagtaccgtccggctactgcttctattcggtcgtaccccagaaactcccgattcgagggttctgatgacggcaattcaggtcttctccaaaatgcacagaggatgtctcgttcatccccgccgctgtatccccccagttccccgaacccgcgcaatgaccgcctggggcaagtccccggagtgacacgtccgcctgctgcacagcaacccggcatggccaagggaagtcccaatgccagccggattcccacgccagatcccctgccccatctggatgcctcctcgggtctagactttggactgggcgatacatacggcaattcctatagcgctccgcatgaagatcgcccgaacttcccgctgcccgattcttcgcaaccacgagcattgacccatgatcagggtcttgcaccacagcttcctcgtatttccctgccggccagtgatgttagtgactatggtgatgacaagtcgcaatacaatgttccttcggtcaacattcatggcgcagaagatgtcacgcatagtgccccaagccacgataaccaacatccagaacttccagaggaccctcctaatctggatacgccatatgatagacaccgcgatacccgccggatgactctcggtttgcgcccgttgcccccagaggacccctccgacaacccagaacagcgtgccaatcggattcgttcgttctacaaggagtacttcgatgagagcaagggtccggaggccacatactctgaggacttcgggccggagttctacgaggatggtaatcatggggctggcttcatatacgacccaaccactggcgactactacgatgccgctcatgccgctccattcgctgagccgatcacccgtcgcgcgatgacaccaccgcctcgagcacctccccgcttccaaggagccgccgctcggcaccaggccaccaactctgcgggccaaaatggcatgcccagcccacgcgccttctcgtctgcctctggccgtatgcccccacgcggtcccaagaaagcaattccccctccctcaccgctacacatccttcctactcctcacatgttgacggacgactccctcttgactgccatggaattcgcgccggccaatggaatcaaagaacgccgcgcgggtcgccctgagacccccagcggtggcttacgcccgtaccagcccggcccgcgtgcgcacaccccactggcctctgcgttcgacgagctcatcgtgatgcccagcccgcacgccctgcgcaagtccggtacgttcaccaatctggactttgtgcccccgcctcgcttcaagaacgagagtggtaccggcagcgatgccggtagtatccgcagtgctcggtctgcagtctctgctaccctccagcaaaatatccgcgcgggcacgtaccgtgtcagtcgtctgcctgcggaagccgtcggcaccaaggatgacatgatggccagtctgcgtccgaagtgggacatgaacaacgcataaggaagcggcggtaccgctttccactgtgatgactttgttgtcttggtataagagcacgtgatgatttgatttgatttttttttgttcatctgggtcccccggtgcttgagcttttgggggggtgatggagcgcccctttttatattcattactccattctcctttttttgtctggacatctactatcaatggcgtaaatagacgatggttggattctgatcaatttgaaatttctttcttcggtctggggtgtatatatgtgtatagttctagaacattaatgtgctcagatctggagtataacatacaacatacgaatccgcttcgattcgtccgagggcactgtgtccacaattatgcgtccgactacgtacaacgggaagtcgcgcgagttggcagaaatcgggccgagcgctaatccaccaagtcaggggctagatgggagagatcacagcattttatttacggggcctaatagaatcgtatttaacgggctagccacagaaaacaagattatccacgccgatcgtcttttttctttttcccttctcgtcctagtagacagaagatgtgtacaatatagttacatgtcagtatagtattgttcaacaccgttgaagaagtggagataatcagagtcagtggcaactgagtacattgtgcatcatgactcttttatacaacataccacacacgccctcagtggaagattcttccgtccccataaccttgggattcggtccttgcttcagggcttatacccacgggtacgctcatctcggttggaggtttcggtaccgaagaatcaatacgtccacggctggtagtaaatattggcaaataggtattattctgggatttctgttgtgaatattagaggcatgaaaggtgttagaggtataatagagtctcacagagtacacacagtaccacggaggattattctatagcaccagagactccatatggtcaggggctcacatggccgcatcaagggattgccagaaacagcatcgtgtttgggatgtaactgcaactcgactgtagcataaccagatttaacgatcatgctgtttctacttcgattcagcagagcacaagtatctattaatacaactaggaatgcggatacgccgcaatcgtaagaaatctaacaaatctccacttcccacttcaatctcactctcccacaccacttttctcctcccatggctgctagattcggcctcgagagactgtgagtattcgttcttctctcttttccatccttcatcttcattttcctttctcttcttttttttctattcccgtccgttcgtgagatatcgtcggttttcccctgaagactccgaccatagcctcaagtctctccttacgcgttcaaatcgcagtctctcattaaaccagtctattaactcggattcaattcgtgatccctcagtcacattcagtccgaaattctttccgcacccggaagtgtccacaatctctcaaaactcgccgaacggtctcccggctcaggatcgcttcgatctttaccaccgccaactcaatctcaccgttgattatcattgaccagtattgctattgagatggcgacttcagtatccaagggcgctgccgctgtcgctacagccatcggttctaccgccgcggacaccgctgtacagacttcggcggctgctgagacaaccagtgagacatctgccgctcaacccacgacctcttcagccgatccgacgacttcggctgtcgaaacgacaacttcgtccacggctgctcccaccacttcgactgaacccaccactagtactacgagcagtactacgagcacgactagtagcacgtccacgccggagccgactacgtcgactcccgagcctaccacgtcgaccactacgtcgaccccggatcccaccacgtcgaccacccagcctgtgactacttcgtccacttcgactacttcttccacttcttctaccacaaccgccccgaccacctccatagctcccgagacgacaacgttctcatccacacagggaactaccgtagttattatcacgtccactcaattagcgcccaccgccgataccacgtctatcacctcttccagcgcaaccgactcggccgcgctctctacctccaccgcagcagctagctccggtggtctttctcccagcggcacaatcgctgtcgcagtcgtggtcccggttgtctcggtggcattgatcatcctggccctactcttcttctggcgtaagcgtaaggcgaacaaggcggccgaggaggagcgccgcaaggaagtagaggagtacggattcaaccccaacaacccgaacaacgacccaacccttcccggtatggcaggcacggtggtgcccaaggacaacgaatcctccggctaccgcggctggggaactacttctgccgggcgcaaggcgtccaccaacctctccagtggaatgggtggcctggccatgtcggaaggcagcagcccgggctaccaccacggcgcaacacctagcgatggcactgtgcaatattccgatggaacccggcccgactctggagagatcgtcgaacctctcggtgtgctaggcgccgccccagtggctgccaacaaccggaataatggcgatatccaccgcggcccctccaacgcatcttccgcgtactccgcagccaaccgatccgacgcatcggaagaaagtcacatgtccgctgtccacccctcagctggctactacggtgagaacccgtactacggcgacatcaacacgcacggggcatacggcggggacgactaccagcctgtgatccgtgacgtccaagcacgccgcaatacccgcattgaaaacccgggcgtctatccacgacagggcaatgccggtatcgcgcagaacttctgatggctcgactgattcggatttcctatactctttgatctccaaaaagctcggcattccatttggcattccattttttgtgtgcttgttttgatttttgatttttttttaaccttgcacaataccacacgctctttctctctcacccaccgccgacttcattcgttttatcgggtctctcatgttccaattcccggcgcgatggaccttcacttcatgtcactattgtccctctacacttttattttcttttcccctctttctgtcccccttaatcggcctgtcgggctttgatttggtttggtcatttgtttgatatatcccgcgcatctggtctcagctgcatagcttgttttttcgttttctgttaacacccggttttatgtctgtgttgatttgttgttttattgtggagctgcatcttgtacatttcctgctgcgtgtggagttttccatgcacctggacatactcgagatttgcaatgataccttgggtatcctggatttagtcccagttcccttgtctgaaatgaacggtttaccatgagttctggtatagttactcggagagtgccggcagaatcgtaaaagaacagcgaataatcagctaacttttactaaatacaccctaaacagcccaaccgagtcaaatggactctaattatggctaattagagtagtcattactaaaaattatgcatataataaacgtactcggtccccttccgttgcagtggtcaccagtaggttcacaacgtgcctccgctgttcgcggtgattggcgctggatgattcacacagctctccactccccggcttaattgcacctcgcagcttttcccttctctcgcgagactcgaactatagagaatctcctaacacgttctcgtccctgggccctgtacttgtccgtcggtctgccccgctatctctctatcgccctctatctctattaccgcttctaccttagaccctctgcgctccctcaatccttagcatctaatcccagttccttcatcatatatgggcgaaaacccatcgcaacgcaacgtcacacattttatcgacttgtgtcactctcttacctgtcccactattatttccttccccactgtgataacccattaactgcccctcttgcctccgaagccgaaccagctttggttcgtgtccttgtcctcccaccctcttttacttttttttcccttccccaatcccaatcccaattgtttcctttcctttgcattctactctacctcgcatagtcaaccagctccgattcttatagctctcggctccgtttcgctgagcttgcgctacggttgcgatctcggtctccagagctcgggagagctaaagctctctccgagagtgtgcacacaacatgtacgtatgcctggcagctcctgttgccggttgaaacattcctcgagctactgctgatacgccttgattgcataggaagttcggcaagcagatccagcgcaggcagctagatcttcctgaatatgccgccagctttgttaactacaaggcgctgaagaaggttggttgaacgtcctgtctgcttgcgggaatatggatctgagcaggactaattcctatacagttgatcaagcaactcagtgctaccccgactatcccggcacagagaacagccgaggagattgctagagctaatgccgacccccaaggcgcgttgcgcgcgaataaggaggttttcttcttccgtttggtaggtttgggatactttcctgtatggatggtatgtacttactatgatgtaggaacgagagattgagaaggtcaacactttctacctccagaaagaatcagaggtatggccatttattatatatccagtgcacagtcacccccctccggaggctcatccgatcccttttagttttccctgcgcctacggacgttggtcgacaagaagcgggtcactcaatcccgggcgatctcgaattctaaagctccgtcgaatttcgcggctatgtttgaaggcttccagcaattcgatggcgacctgaataaactgcagcagttcgttgagatcaacgagacggccatgtctaaaatcctcaagaagtgggacaaaacctccaagtctcgtatgaaggagctgtatctacatcgggctgtggaagtgcaaccatgcttcaatcgggaagttcttcgagacctcgctgacagagctactaccgcgcgactggaattggaggcttgggccgagggcgagaacattcaatatgacgcatcacgtccattggaccgtaccgcacccttaggctctgaagaggatgaaatggacaaccaggtcttgcagtctgcctccgctggaaatctgcaaaacctacgtgaatggctggccaggttacagcagttgccggacgcccgtgagcgcgcaacccgtacgttcctgaccgccatcaacgggttctcggatgatgtgctcgctctgctactggagagtcaactggttgacatacacgccgaggacgacatcaacgaacgaaactgccttcacgaagccgccatctcgggccgattatttgtcttccacgccggtctccgcgcaggcgttgatttcgcccgcgccgatgtctatggtcgaatccctctccactacgcatgcatgcacggccgcgtggatatggtgcgacatcttctcgcagccggtccgcaaaccgtcgacattatggaccatgacaacttcacccctctaatccacagcattgtaaagggccagctggaatgcgccgagcaggttctgcttagcaatgcccgcgtcgacccggagcccgagtcgcctcttctgaccggaatggataatcgtcctttgaagggtccggatcatattcctttgaatctcgcctgccaacacggctctctgcctatcgcgaagatgcttcttgagcgaaatgcgcagttgctgccggatgcagagggtctctacccgcagcatatggttgcacgtgcctcacaatcgccagacctactactactgctaaaggagcacggtgctgatctcgaccagaaagacaagctttatcagtggactccgctgttccacgcagctagcgaaggctgcgtcccctgcctacgtaccctcctcgagtgcggggttgatgcccaggttgtagatgaaaagggcctctcgtctatgtactatgctgcctgggaaggacatctagagtgcatgctccttctctgggcccagccctccaagaaaaaacccgcgctgggacctcttgatattctcaatggcgtgcggatgcatgaacctggtctgggcgacccgctgtctgtgactgcgagcgtctctgaattggaaatgacagatggtatcccggaccttgaattgcctccccccattatccctctccgccgctatggtcacaacttcctcgacaagaaagtatttgtgcaacttctgttcgatcaaggaaatgtcgggtctgtcatctttgatcaggcgggccgtcatcctgccgctcgtatgaccatctcttccaagctgtcagatctcatccctcgtactatcatgctacccatccaggaagagacacgcacaatatcgttccacgtggataacctagacacctttgccgtggactttgagatcttccctaccttcggttcaaaggtgattgcaaagagtgtcgccctgccagacatcttccgcgccgagtcgtccagcactggctcatgctgtctgcctctattcgacccccggctgcgtacaatcggccagctgcgcttcaagttccaagtgatcaagccataccccggcgatcccctggagatcacccactttgctacatactggaaggccaccagtgctcttgattcagatcataatggactggtgactggttccagtttgtcgggagattacgtccagctcttcgtacaactgacccgggaccgcgtggcagtcctttacccgcaatttacaatcaaccaccatggaatcgacattgcaatctctcatttgacgtttgcccagttccagaccattggcggagagcgcggtttcaaccctagcgagatcctcgagttcttgaaagaatcagcgacggttgacatagcgcagacccatcgactcttggcgacgtcgttcttatcgttacgcgatgtcttgcgctacatccctattgacttgaatgtcaacatctccctcatttacccatccgccgcggaggagaagaagctcgacctgacttctttggcggacgtcaacagctttgccgatgctatcctgactgatgtcttcgaccacgcccgtgtggcccgtgaaaagaatcccgagttcatgcgttccgtggtattcacctcatacaacccgaacatttgcagtgctctcaactggaaacaacccaactgtgagtctcctaatacagtccaatttgtgtgatactaactctgtgactagatcccgtccttctctgcaacgatctcggtcaaatccgggacctggctgggaacgtcaactcgatgccccttgtcaacagcagtggacgagcttcgatgtcgattaaggagtctgctcgtattgcccagagcaacaacttcatgggcctgatttgcagatcaagccttctggtatgtttgtcctatttcccgcctcttttttctctgctgaccaattagaatgtcgtccccgcgctcgtcgagactatcaaggagcttggcctcgtgcttgtggccgatacctctgatgaggtcacttcgaatcgattcgaagaactacccgctcctgatactatgggcgttgccgaatgggcttaccgcatgcccgacggtgttaacggtgtgatgagaggcaacggcattctgagatttaacgatatgatcgatatgtgatccgatttacctctacgcaccttttacatacgatacgtcgaaatttaatttctcaacgaagattacgagctttagtagccgccagaattgcttttttttttcctatcttactcttggctatttatttcacagcagagatggtcccgcgcgtgcgaccttctctttattgcgttctaggcttgttcatttcctagtcatcttgggcgctggagatagggctggcgtttttatctgggtttggctttgtcgactacatgtagtgagatcgtctagagagcaagagcaagagcatttgagagttttgaaggcaaagaaagactgccgtattagagagctgaatggctaataatgtacaatggaccgaatcccaggccctagtatctcccgctatgctacttacttactgtataatcaatcacatccccttcacttcacttcacgtactcttaggctttctcttcccaatatcccatccccacctccgcagcgtcttcacaaccttgggcgtgacagccgccgtcaaaggcacgcgaatgaagataaagctcttgtgaatcgcataagcgaaaaccaactgcgtccagatacctgcgtgaacacaaaccaatcagtcagaacatcactctcatcactcaaacctcaaagccctaaaccaaaacagaaacaaacttactagcttcctcctgattccgctcctcagcctgagcaagctgtccctgcccatcctcctcctccgaccccttcgtcttcggaaacacactcttaactttatccttcacatacccaataacaacatgctcatagtacccaatacgatcaacaccaagcaaccgcacagccgcaaaacaaaatgggaaatccagcgccgacaggccaagatacacgcccagcgcagcccatccgtactcgcgcgagagagacttcagacgctgggatagtgaaggtttcggtttagttttgccgccgcctctggacccagttccatttccaggtccagagtcagatccagagctagagttcttgccatcaccagcagacccggagttgaatcggcgctgcttgggcttgggctggaatgagctcggtgtcggtgtcgggcgggtgcgcgtcgagaagcgcgctgttacttgtgctccgtgcgcgtgcgggaagatcgtgctccggcgtgcgagggatggacgaattgaggggttgaggtggagctggagatgtgaagctaagcttggggatgatttgagcatcgagctagggcgcgagatccattttgcgaggagggttgggcggacggacatggtcggatgggttttggtagccccgttggttttggtgagggtgttgtgtgattccgggagcgaattggggttgagaatggagcggtcatggaatgctggatgggagggtttttttgtgtttctcggcgttttcggcttccggtccgatcgggcttgcggctctgtatgccggagttagggattaaggcggtttggtggttgtagataggatgggatattgtagatgggtgttaggatttctatcgacttttttctttttgttaaaagaccttggtattagctaactatgtcttaacgcgtggggagattgccagcttggatttgtatacttcagggcggcgtgcatatcgctgactaagcccaacaccaaaaacttcccgagtttctcagccacgacgagcacctcaatactcaaacccctcccaatatcaaacccaccatgtcgccgcgcttaggagggctacttcagctctcgcccgtatggacgagctcattgatcacgccccggatccccatgcggtcattcggaatccgatctctcaacccgcccaagcccagtcggttcaacatcgggcccggactaccagtcctcgagtcgacgtcgacagcggctctcctccgcaaggcctattccctgcccctccgcaccggcgccatcggcatcaagaagggcatgacggccatctacgatccggagtctggaaagcgcatcccctgcactgtcctgcagctggatcgtgtggaggtgctctcccacaagacccgcgagcgacacgggtactatgcggtgcaggtcggtgccggctggaagcacccgaataacgtgaccaaggctatgctgggtcatttctcggttaatgggctctcgccgaagcgccatatctttgagttccgcgtcaaggacgaggcaggccttctccctgttgggcagagtattgaggctggttggttccaggagggccagtttgtggatgctcgctctaataccaagggtaagggctttgcgggtgtcatgaagagacatgggttccatggtcaggatcgcagtcacggtgttagtttgacgcatcgttcgatgggttcttcgggtcctggtcagggcggtggttcccgtgtttaccccggaaagaagatggctggaaacatgggaaataatcagaacactgtgcagaacttgaagattctcaaggtggattctgagaatggtatcgtggttgtcagcggtatgtgattagagatgctctgacctctcgaagtcaattttgctaacttatatttttcaggcgccgtcagtggtcctaagggctgtgttgtgagaatccaggatgccgtcaagaagccatggccggaagtgccacaggcaaagtcggctgaacctgccacggaacctgctactgcttaattggagatttttcttagttctgaccatgtactattacaccatacgcgcgatattgtttgacttgagcggcgtttgtatatgatacaaaaatgatatcctttcttttttctcttagccattgagaaaaaaccagtggcttcgccaagttgataacgcaacaaatggtcccataaagaatgaccctaaacgcccgagccaatgcactgctgtatctgtacactctctccccgatattcgccccgatcttcagttcttccggaagggatcgctatcactgtcaagcaattgaaccacctttccatcctcagtctccagactccattcctcagtacggaactagaagagaaaacaaaacaaatcagcacttatcacaaccataaaaaaaataaatcaaaaactcacatagctcatacgatccggccgaatgcttcggaacctcatcttgccctgggacttagtccccttaacccaaaacgagatattaatgcgcccatgcaattgattcatctcgccactaatccacggaatctgctgcgcaaagtagatctcgtcgccgaggatctcacgagcccgcggcgacgtccgcagcgcatacagcgtgctgttcacgatgctcgacgacgacttctggtaattgaagatgcccagcatgcccgctccagtcgtaaggatgaagatcgggagtgtatacagccacttccggccaggcttcgggttcgggagctcgcggtctgcacggcgttctagcagtgggccggcgttcgggcctggcgcggcgatcattgtgcggcggctggctggcttggggcgggcggtttgccgggcgagcgcggcgcgccgcgtgaatgctcgggagaagaacattgtggtgttttggagggtttgtttggttgttttgtcgggctggttggggttggggggtggagaggttgcggaagaaaatagtgttcaaacaagacaaacagatcgggcggtttcgacgtcactgcaccgccaacggatgagattacaacgctgctttgagatttagagaaatggctgcggtgagattgcgcaaggcgtttcggtaccctgaggaatcggagggcgaacgagaggagttggatgaagaggaacaggaacgcgtcatcgagcagctgcagagccagaatgatgctcggaatgcccagtacagtgtacatatctttctttcttctatattcgagaatccacgctgaacatgtttccaggtgatcttcactgcacttccactgctggctgcgacagtatttgtgccttcggtgctgtcagcttccagtcaggctgaacgattgttctcgctcctcggtctagtctcgttgttgacaacggcgtatatcatgaaacgctctcctctccagcctgatcgcaaaggcaagaaacctatgacattccacaccgaacgtattgctcggatccatgggactctggtacctggcaatagtgcgctttgcttgttgctggctttggtctctctttctacaggatcatcttatgcgatccgaccagtactgtacttgattcctggaggtaagtctgctctttcttcgctggggtatctactctgaccttgtacagccatgctcgtagtgattctactcgctcgaaaggtcatgctctctgttgaccttgcatccctcaaggatctacagtacgagtataaaggtgcctagccagaaattcaatccaacttgaatacatatatgttcactattagtacagccagattttttttaaaccatgttgtcgcagaagagataaacccttcggggaatcacaaataatacatccgatttccttaatcaaacaccattttgcaaatattcagtgttcatatcccacttttaatccttctgtatcatcttgcgcatgtaatctctgttgtatgctcaaatccggaaaatacagcaacgttcatggccgtttcaagtgcttacggtctcaacagagtcctggatcaccaacgatgggtcaacggggattcccccgtagtcctcataaaggaccagtagattctcatcgtcctcgttctcatcgtttccgtccccattcggtaccggctggtcgaatgggctggactcgaagctgaagccctggtcctcgagggtcttatgtcgttccagttcggcttcctcagcttccttctggcgtttttggatgcgtccatgaacatcatcaccaaatttcttcaaccaccaaagattcgatttccggaaatccaccaaggtctcgatactgcggggatcggcaaccttactagtgtcatggcccagaatggtacagttaggctcatacggtttcatcgaagggtcacgctggcaagcagcgcaactgcattctttacgacattttggacagagccagtgatgtttttccatcgcctcctgtggggagatttcaaacgcgcggaacaaactgccgtaacagtaacgctggtcacagtttgagcatggagcgagtttccagctaacttcaaaatgaagacaaacgtgacagcggccgacgtcatttgattttgccaggagagactgccgcaatttgcggcgctttttagatcgattttcgtcttcactatcagcgtcttttgtgatttttgccacggggttgggctttttagggtcattccaagggcggcgcaccagttgctcctggcagatctccgccacagactttttgcctgcctgacctcgggcgacaaggaaagtgggaaactgaaccttgaaatccttgttgttctcatcagaggaaaatatcaaccgtcgccatgtttcataacgctcggtcaagtgcttccatgtaaattgttccatccactgaaggttcgaaacacagccacagcttctacccataacgtagcaatccatgcagacatcataaggatcttcttcgccgccgagagcgtaggcacagccagaacaggtaagaaacctgttaaatatattgcaccggcagaatgagcaggtgacattgctttgaaactcgtggtactcgacattcttctctgggtttttttgtgagaatgactcagacaacaaaatattcttgtacatgctgaatagccgcttaaagtcgtcccacagttgaatcaccaccgggtggtcgatattttttgcctgccgcaacagtttggaatatcgttcgagagtgaagtaaacaatggctttattcttatattgctcatcgcggcagaccatccgcgcatgcggtaaagcttcacgcagagccagctcgagggtgtcaacgatagtgcgattccaggcaactttcattgtccgagtgccacggttccaaacctggtgtgcagcgagaggaggtacaagaataagatccccgggtttttgttccaccacccaggtcttgaatggtgcaatcttccatgcatgcaaaggagcaaagaaatcctcgatgtcaatatcgtgccctagaacagacatccagtattcggaaacaatccgccgatctttggtctctgtcatgagccatattgaagaacccggttccgttggcttgccgtattctggagacccgtcggacgcgtcgaccattatattgtgaccgagactggcacacatctcctggtgtgctggtgtgtaagtaccctcatggccaatgtagcacatcaggttctccgcacgcatgtttgggggcagactgctcatcaaatcgcccgctggggcgatgaggtcgccttggggggtcctagggatttcagccagattcgtctttcccgacgcagggccttcaaaggctttgggtgcttcgttgaggtaaaacaatgaaggaggtaacagtttctcaaggtaagcgtgccactcaggagggcagtcgatgtccttgaggtagagccgttggactactttgtctgcgtagttgtggacagttatctgccgcgtgagaagtggtaggttttcaaggtaatggcccatactgaagttctgggtcctcttttttaccagatctcgaacctcctcaactaagagaggttgcagttagaatcaaccaacgaaggttgagaagactcaagagcgtgagcttacctttcttcgcatatttttctcggagccatttttctgagaaaatctgcttatcaagatgtttatcaaatcctctgatgaccagtggttttccgctcaggacaacttggaacaggacaagcttctcaaagtctgcgagcggaaattcatcgatagagtcacaggtaatattcatcgcaaactcgaaattaggggtagattcaacaacctcacgaatgtcgagaagaggcgataggggctcgaaagccaggcgggttcgatgtgccggcatggcgagcgcaaagccccagagggggcaagatatcgacgtctagttgatgtttgtaatcggcgcgaggctcacagggaccgcttcatgatttgagggggggggggggtattggtagtcacagccgatatataggctggacaagtcttgtaatcattaaatcgttggctgaattgcgctggtctgtgttgtttctgttgtttctgttgtgcggcgtgatgatggtacgagataagagcggagtaggaaggagcagaggggcagtggttgggtatacactagctagaacagaagagtatagtatgtcaatttaagattggaagccgggaggtataaaatcagacagggtatgaaagaaagtcatgtcgttcgttccctttggttcgggtgatcaccgacttctgttggaacgcgggatgccgcgattgatggcctcaggcagagacttacacgtgaaaccttccaatgttggaagtgtcacagttatttcactattttatctatatatttccaatggaacttagctgacatagcatattatctttgcttggcttaaaggttataaaatttaacgcgttatatactcagcagtcagcatattgtgacagcgcaactccatagatctgatgccccaaataggcttaggcggagggaagccgcttctgctgcatgccgatctaatttccgacttctccagatctttgaatggccagaccttcagggcttttgggaggtatataaatattgccaattgcctgattgactcacccatgtttggtctctagatcccctaccctcgctatgctttccaccagctcccggctcttccgcgctcgactatccccatgcaggcaaaaggtcaacctcagtctgtacaatgggcgcctttccacactcgctcacaatgcccgttcttcaactcaattgaatggcagccgatctctcgctggtgcctcatctaatgccttgcaaccaacacgagtccaagcccgacacagctcccagttgcaatcgcctgcaacacaagcaatcgagacggatagtgcggagaagaacccagccactcactacaccccaccgaagacaggcctgattgcttccctgccgagttcatggataccgtatgcagaattggtgcggctggacaagcccacgggcacatactacctgttcttcccaactctcttttccacactcctcgctgcgccaatggctggtgtggcacctctccatgtcttgggcacgacggcactgttcttttccggtgcgctgatcatgcgcggtgcaggctgcgcgatcaacgacctgtgggatcgaaacctggaccctcacgtcacacgcaccaagttccgacctattgccagaggtgcactctcaccgaaaaaggcaatcctctttacaggctcacagttggtggctgggttgggcgtgcttctttcgttccctacacagtgcctgtggtatgggattcctagcttgccgatcgtggtggcctaccctcttgctaagcgcgtgaccaactacccacaagctgtgcttggtcttgccttttcatggggagctataatgggattcccagcgttgggggtagacctgcttgccaatcatgatgccttgatggctgcaggtgctctttattccagttgtatggcttggacggttttgtacgatatgatttatgcgcacatggacattaaagacgacgtcaaggctgggatcaagtcaattgccctccgccatgagcacaacaccaaggctgtcctgagtggtctggcggtgactcaggtctcactcctcgcggctgcaggagttgccgccggttgcggacctgttttcttcgtcggcagctgcggcagcgccgttgcgtcgcttggtctcatgatctggagggttcagttgaagagtgtcccgaactgctggtggtggttcaagaacggatgtctgctgaccggtggaggaatatccttgggcttgctcgccgagtacgcgacgcagtaccttggtttgtacaatacgacggagccggagcgcgtgatggccgagtcaacgcaataagcatgtaacaatatgtatatatagacatccagggcttggttccctttttcacgagttctgcaccaatcctgcgtagttttggatgacagtgacaatatctctccagtccatcatatttccggtactgacatctaggctgttctccgcgggaggcagcaaagtcacccagccttccgggtttgattcactccatccccactgatcacgtaggactttaaactgtttttcagtcactggatgtcggtacatacatctgtccatatccaaggctgcaaagatcctaggtttctggcttttgaatcccatatccactactccagtcgtgtcccaggccctaatgaccgaaagaagcaagttgtcggcgatcccattggccattttcgccatggtatttgcagacattggggcgaccagtagaatatgcgcccctattatgatgtcagttcatcgtggtatcacgtatcattcatctacatagccactgacatttgcgcagctcaatatgcagcactggtcctccgcgtgtccacgacggagaccattcatcttcgtcccggtagatagcgtccacaccatctatttgaagcagagtttcgaaagccggctgctccaagatttgtccgacgaggaacttctccgctggctcggtgactaggatacggattgagaagttcttattacgacatagcgcctctgcaatgtcaggcagcttgatagtagcggctgccagtagcacatggatcttcttgtcatttgcatactgctgggcgataaaaggcgtcggggatgttcgagaatccattgtagtagctttaattagaagggcagaaaagagagaatgactggtccatagagccctagagagctttagatgtgtgggggtcggcggaccaaccgcggattaaataatactaaacctttccccgaggcaacttgacgaacctcttctcttgtaaaccaccatcattatcaaaatgttttccagagcagttgcatcggtatgaactgttctttattctcgacatccgccattcgcatcccccagctaacatgaatctcgcaggctttccgcccggtctcgcggccaacctttttgcggcccgtccgctccgccatccgattcccctcgggccctgccattccctccgtcctccatgcacgccttctgtccaacgagacccggacggcgatcgataaggcggtctcttccgcccccgtcgtgctgtttatgaagggtacacccgagactccgcagtgtggtttctcccgcgccaccattcaaatcctgggtctgcagggtgttgatcctaagaagtttgttgctttcaacgtgctggaggatgcagagctgcgctcaggtgtgttgggattaccccgaacttcctgccggctatagattgctaatcgtgctgcatttacaggtgtcaaggaatactctgagtggcccactattccccagctatacgtcgagaaggagttcatcggtggatgtgatatcctaatgtccatgcaccaaaatggtgagcttgctaaacttttggagaccaagggcgttctggttgcggcggatgaataaataacagccgggcccgagtggaagatgtcagcctatcaatttggtagatggctgtctttgtaaaattatttgtctctaatttattttggtcctaatatcctgctggtcagatagttgttttattgatttggcaaatggaaggtaatctccaatctgtctgctccagtagaccaattgtcacaagccgccatgcaaacgacgaggtggactcttgttcaagaagtaaccccagttgatggggtttaacatcatatgtagttgatcttcattacatgattagtatttctcttaaatcgacagccagcctaatgagctgcttgagctgcttcggctgcctcttgtgctttcaccaggtcttcggcaatggctttgtccagctttgcgcgttgcctggcttcgtaagcttcacggctcttcaggatccgaccaacaatttcgccagcgttcacgtgttggaaggcatgctgctcggcttcccggaagattcccatcttcttgggagcagtgtatggatcgtatgttagcgggatgaaggtcgtgggtccatggtagacagcatcgggagtgccccacgggatggccttcagatatggttcggtaggggtaaatggtgcagagaagatgacggcattgatgtactgtggcgagggttagcaaatcgaacagacgagaggaaattaagaaagacttacgcggcattgaagaacacataggccacgttcgaagatgttcatgattgggtagttcaagcctttccagtggttgatcacatcgtcatcgtggatacctgcgacaatgtaggacggtgcatagtcctctccgtagtccttcagtctcttttcaacttgatctggctcataccagccattttttcggccctcggactcctcgagctccgtgactttgcgcaggaacgcaatgtgaccggaggaaaaaaggtcgaaccctccgtcaacataaaccaccctctgcccaggtttgggtccctttccgtcgactaatttctcgaatacaccagcttcctgaacgacgtggtccatcttcgcggtgcctgagccagtccatgtccacacctgaggcccaggctgaagaccactctcgtccgttgcgtaatccttgattctctgcaaaagatctttggcggaagcctgacgctcttcgggacttccatatccttctagtccagcaagtgtacccttcacagatttgacaaagtggttcctggtgcacaacagcatgcggccaacaagatcggttgtcgagatgcctggggtacgtttgacgacacggaagcgcccagcggctttgacgaagcggtaacagtcatttccatcactgtcggaagtaatgtcgtctccgtgtacgacgtatttgcacccgtagtgggatacccagggtaggtaggtcacatagggggcatagggaacactctgagttgcccatcgacacgcgtcaacggctgcgacactaaataacaacgacattaggaccaggaatcaacaacagtaccagcatgagaccaaaccgaccgttcttccagtgacatcactgtcgggcccttgttctcgaggatagcttcatcggagtgtattcccacgtaaagggcctttcccagctggcgagcttggagcatagcaccggcatgacctgtacaacaatccatcaattagttcacagcaatttaccaggtgttaattgccaacctaccgtggtggctgaagtcgaagcatccatcgacccaaagtcggtcctccgagattggtacatcttcctgggggtcaacaggccattgtccaggcagaggaacctgctcctcgaggggtgttgagtccattttcacaacagtactccgtaacaatttcaaaattgttccaaagtctagactgtccaggaggtggggaggggggatcgacgataaattacatacaatatagggggtacggtcacagtaatcttccgcattgcggggaactttatgtttctccgagtctcctgagtcgcaatcaccttcaaacagaacatatcaggtcttgccatactccccgaacagtctattcggtgtcgtgctctcctgggctctcgtcctctctgacagctcagcttgtccagctatagacccctcatctgcgtcgcatcgtttatttcactccgaaattgacaacaccaatgattccctctacattcgccccgagcatcacgcggcgagacacaaccaaatccggcgttggacttgaaacggcatatggcatcccacctccagttatgagcggagggggctctcttggcccgcaaagtgcaggcgcaatctatcaacacatccatgaaatggcctcgaaacggatagcgactctcgactacctgagaaaggcgtaagtagatcgcagttcagccacacctgagctgtgctaattcataccgcggtgtctatagtcatgaaggacgagtctattggtttaatactgtgcatttctcccgggctgacatcgctcgtctgccatactttgaagcccggaaactgtctcgccgcgcaatcaattatttgcttctaggcttgtcattgcccacaatactcgatgttaacaccaccccgttcgagtatgtgcgtgccctgaatgctttattgctggaattcgaagcgttccagcaagtgcatcccccagaaggcagctcctcgtcaagtcttgcaagggcccgtataccacaaatgttcaagcgggcggcgcatggaggtaccaagacccgacgcgccagctcggcaaacgagatcggactcccaatgcagtccagtgacccatcagacttgaagaacacagcagggaatcttgggtcggctgcctctgcctcggtcacctcctttccactcacagagtcttcggatcttcaccctggcgaggaatacacttatcttcttacgccatcgttgccattcgagccagacttctttgagacgtttgcaacgctgtgtgatgtcttaattgacacttatagccggctatgtgctctagtagcatctccatctgtatgtacagtggccctgggcgagatattttccaaagcagatgcccggttacgaaagattatggtggccggcgcagtgcgtgagttcgaagacgcgagccgaaacagtgtcaagagtgaaattgccggggtcagtcgggtggtgcttggtggtttattgggatagcagcaaggttttgctgctgtataattgggtctggtgtcggtggtcagttttgactggacacatgtttgggtttcttatgagacatgaatttatcgagttgaatgttatatgataatagaatttcagatctaaatttgagagcttctagcttctaataatacatatgttccgccttcttcagtacaaaaagtaggatatgaaaaacactcactcaaaataacttaatgggactttttttggaaatgcggcttcgtgaggcaaaaggtggtattcatgggcagcttgaaaagagtcgagaattgaaaaaagagacaggttaagacgaaaaactccacttggcgccacatgctcgaatatgcaaaatagacaccgaaaatatgctgtcgcttgatgttgaatgctgaggagaaaaaacaagggatatgctgttggaaagaggtcgcggaagtatgtcaaacgtatgagacattcatgattgtaggcgctgcttttcaagttcgcgctgttcgccgaagacgcggcggctcatctcgaggacggtttcaaatccttcgcggccaatctttgcattttcccggaagcgatcaacgcttgcctcctcaaccttgttcttgatcttttgccatccaccgcagagagcggtgattttagcttcttggctaaattcggtcgtggtagccgggctaagcgaggattgccggtagataacggtctcgcggacgctgaggacgttcgaccacgtcagatttgtggagcacatggtcaccttcttcgcgaccggatcgacataagagacttcgtaaacgtgagaggtattcgttccaccgagaatcgagagaacccattgtggcacagactgatcgcacgtgataagacgttcggtccgtaactaagaggcaaaagtcagtaaaaaggttcgggatatttggagagttctttgaggttgaatgactcacaataccagtcgccggatcgacggttcgagagagcgtgtctacgccaacgacgtgtgtcgacttatcattccaaggacagtacttgcgccagttcgccgttgatacttcgtcccacgagtagtcgaacgtgcatccggaagagaagaccttcatattgccgagtcgcagttcacttgaacgatgccgttgggtcgcgtgatcttggaatatggtatttgggtgtaggacagccttgacaagcgctgtgatggatagaatcggatggtagtgttaataaatccgagtagatatagtaagaatgattcaagccgagtgtgagagataggatgtgcaggagttgcagaaagtgatttaagtctaagtctaggaattggaaggcaaatatgagcaagtcaaatagaagaaaatggagaagagtggattttaacgatcgaccggtctgaggggaaaatccttcttttttccctccgggtcagggccggtcaacgcggagcgccacacgcctcgccgccaccgggtttttccggttcctgcttatctaatcagcggcgcagccgcaccgggcagatatgcagctgagatgttccagaacgtccaattaactctattcaatacatattcgtcgattcgggtctttatatcttctccttttctatacatcatggtcgaactcaggaaacgcaaggcgccagccccactgcccgtcgcagagaagaagaccaaacaagcccctaagcccaaacaagaggcagctgttcccgataatgataccgaaaaaagccctgggccaaaactccctgaggtggatgatacaatcgacatagaaactttcggtggcgagtttgagaccaatgaggctgaaaaaacaactctgaagaagctcctcgaggagagcaagaccggcgtggttttctttacttaccccaaagcctcaacacctggctgtaagtccctgtgtcatacttagtgcttctcttgagagggcagagctgtgttcatgtcgtactttgtaatcatcttactccagcagactgcttacgccgcttcatctaggtaccaagcaagcttgcttgttccgtgacaactacacccacttgacttctactggtctttctatctacggtctttcaagtgattcccccaaggccaacaccacgttcaagacaagacaaaacctaccttatccactcttgtgtgaccccaaggcttctcttattgcagccattgggctcaagaaaaaccccaagggtaccatgcgaggtgtctttgccgtggataagaagggtaaggtcttgcttcgcgaggccggtggtccagatgcgactgtggacgctgtccagaggattgttgccaactggtctagcgtggaagataccaaggcaaacggtgaagataccaaggagaaaggtgaagataccaaggaggaaggtgaagacaccaaggagaaaggtgaaggtaccaaggaggaaggtgataaagcagagtgattcaactcgagtgatgtcgtcacaatcacacaaaaagcgacactaagataccagatattgcatgtatggcaccgtctatggtggtttatttgtctcggtgtacgtgtttggcgtagattattagggctgtcaggttgtttttgaattgctgtggattccaatctattcagtctgagatactggtacagcacacatgatttcttgcaacttcccctatccactgacgatgacacctccgttggggtgcaaacattgtccggaaatatagctgctgtcctggcttgcgaggaaaacgaagcacgttgcgacctcgctaggttgtcctggtcgaccaatcggcactgcatggaattgttccatggcctcggtttgcattgtcgcaggaatcaggggcgtccagacttgtcttattagcatttgacttggaatagatataggaaggacctacttggacccgggcagacacaattgacccgaatgcctttcttcacctgctggttcgacaaggcgcgggtaaatgcgacaattgctcctttgctggaggtgtaatccaggagatccgctcggccaatgtaaggattgacggatgcgcaattgatgatggtagctccccgcttcatatgcggaagaacatacttggaaagataatagaaggggtgaatattggtgtcaaaggtggtctgccactggtctctgatggttcattagtaggatgcaacagccgaagagcagtaatatggggcaactcactcagtgacctcgctgatatcgctcagcatgttttggaacccggcattgttcaccagaatgtcaatgccacccatcttttccagggcctcgttgatgatcttttgacagttttccttcttgcgaacgtcgatagcgagagtatagcacttctgtccacattcctcgactctcctctttgtctcttgcgcatccgactcctcagctggcaggtaaacgatgaagcttgaggcaccctccattgcaaataggattgcaactgcccggccaatgccggagtcaccgccggtgatgattgctctctttccttcgagctttccagcggccttgtaggtctggtaaccgccatcctcggtaggaagatgagcagacacaggcttaggatctcccatgtcagactgcagacccggccttgtcaagtgctgaataggaatcttgtgacctatatgaaacacagtgtcaggaatcaatacttcacataaatcacacgtactcacctggcgcaaattgggacttagccccactggcctctcgctcgatatactgggcaacaggcatattggaaggtttaggcaagaatatgaacaagagtaatagataacttatgtaaatttgtgaatagagtacacatctccatgcaggaaagcaccgtttaagtaaagaaaatgatatatggccaccaataactaaagccgggcatatcaatgtcactatgatggcctgcttacaccccgtttgctccaaattttgcctatactggggcgatatataacttagatgttatgatacaaccagagcatctctgttctagaccttttctgtggcggtggtttaatcgatcatgttaaactattcgatccttcagtcgtagccacaagtttcccatcccagggacgacctgtatgtccaatcgggcaaagtgtttaatacctaaatgacacttctctatcccattcttgatattcctgagctgctatgtttgtggtcgaggttaggcaggtgcgaatgacggagacttgccgtcattcctacctaccatgcttagttggtggcgctcttcacctagggagctcgataacaacaagccctactgtttcatataggaataacatagcatatttctcctttttgttcgtcgggagaaagcaaagaaagatcatgggagaatattgagttctatacatacacctataaatgcttgagcaggtatatgagttgtttcaagcggatttagcgcaagaattgacgtcctggtatgcccttcaaatattaattggttccactataaggaagccatagtaaatcagtatggagaatggtagcaggttttctattgtagttgtcctcatgttgtagtcgaaatatactggaaatccttatcttatcaaccagcaacatgattggctcgtgggcgtccgcccggcgataattttttctattgcgctttccgcttctcgagactcttggtgttctaagaaattgcctggctcttttcacaatggcgaaagggcaacccaaatccaagtccgtgtcggctaataccgccaaaatccctgagcagatggctctttcgtccgctctgtcctctccatgggggttcctccgtcctacaaacgatttacatacagccgtcgtggattctgcaaagcacatcctggactccctcgctggttctgtcgtggatgcccagacaactcgccggcaactcaataaaaagcgcaaaaggtcagacctcgaatcggattcagtcacacagctccaattgaagaacctctacgtggagggtttcacctcgaatcaaatatgggagcaagcaacacgaattctcgagtcgactggtgacgagatcgagcgcgatatcactttgattactcaacatagcggctacatggagtcggctgactccgagcagctcgaggatatctctgaccccgagggtgcgcaaagcgacagcgacagccacgagagcatgcttgaagatctctctgagggctcaggtgccgaagacgatctcgacgaagaatctggcgaagagcaagagatcgatatgggatctgacgatgacatggaagacattgaagatatggacgatgataactcctcagttggctccgccgaaggagagcccgaagtatttgtcgaggatcgatttggattaaacgacgggttcttctctatcgacgacttcaacaagcaatccgaggctttggagagacaggatgccgcaggaggacccgagcagaccgaggacagcgacgaggaggatctcgactggcattcgaatccgttgatggctggaaattctgcgaccatcagtaaatcgaaggattcgcgcccaacagaaaaagaagacgaaagcatggatgatagtgaggaggaagggccgactttcggtaatgccgatctcaacggcgactccgattctgatgatgaagacgtcgcggacatggacgacggtgaagccgctgcctgggtaaacaccagtgatatcaaatacgccgatttcttcgcacctccaccccgcaaagcctccaacaagaaacaccgcgccctcccaaaaactcaacccgacgcaccagaggtcgatgagagcgatgtcaaacgcgctattgacgacgttcgacgggacttgtttgacgatgccgatgcgggctccgacgaagaagaggacgatattgacggatcagcggaccctagtgccccacgctcaacacatgagaagcagagagcacggatcgcagatgaaatccgccgtctggaggcggcgaacgtggccaagaaagaatggatgtatactggtgaggccagagctgtcgagcgacccatcaattctctcattgaagaagaccttgactttgaacgaatcggaaaaccggttcccgtcaataccaatgagaccaccgaggatatcgaagaactaatcaagcgccgaattctcgccatggagttcgatgaagtcgtccgccgtcggccaggcgccgagggccagcaagccggaaggaaaccccgcttcgaactggatgatacgaagccacagcaaggtctggccgagatgtatgaaactgaccatcttcgcgctaatgatcccaactttgtggatactaaggaccgcaagttgatgcgggaacatgccgagatcaccagtctttggaacgaagtcagcgctcaattggatacgctatgcaactggcactataagcctaaggttgcccaagcaagcatcaacgtcgtgaccgatgcgccaacgattatgatggaggaggcacgcccaacggctggcagtgctgccggtggccctgttggacttgcaccgcaggagatctacacacctggcgataatggccgagttaagggagaggtggttcttaagactggcgcgcctatctccaaggaggagatgacccgtgagcagaaggccaagaacagacgccagaataagcaaacccaaaagaaggccgatgctgccaaacccactcaagaaaagcctggcaaggcagccgagaagcagcagatgatttcagacctcaagaagggaggagtcaaggtcattggcaaggacggccgtatgacgaatatcgagggtggctctgtccacgagggtgccaaaaacagaggcgacaatctgaaattgtgaggagtatatttaagggccagtatgtactattcaggagtcatatttcttctacataaaatctattttctagcattgcacatatcatcattttgtgtcacttttctggtcgatacgtttggcacgtatcgtgtagagaaatatgttctctctattatagctttcagcaccaggatcatcccggactggctccatgtcgaaagcccttttcgccatcttcatgaaccgcatgtcggcgcgtctacgacgcttgtaacaaaagtaacagaccgagtcaggtcccaggaggtgctgaagcgtagtgatcaagagcgggaaagccggctcaaaatagacacagtctgccgcgatgatgacatctggtttctcgggaatctggtttgggatcggttctccccagtttagtatcgcagctgtcgcatttgggccaagattgttaagttgaatgttggacttcattagggaaaacataggctcttggtctgtgatatagatcgggtgctcgagacgacacgcacgtgccacggcgagtccgacaagtccacctccagcgccgagttccacgctattcaagattggattaggacgaaacgagcgaagaagagtgaatggaaagaatgctcccggccggttgggcacacagcaaagcaaagcagcacccacattgttttatcggatagatcggtgatatggcggctgaggaggtatttggccaggaccattcctgcgggccatagttggccgccgcagccgtctttcaggtcttcttttagtagcaatggttctttgaggagtccgtcgaaggaaatgtctgtggtcactgcggctttgggttcgcggggaggggccagggattcgctgattttgagtccgtctgggcttgagggtgggctcagttctggaagacccagaagagttggtatgggtatttctatcattgtgagaaatttgtgaattgttgactgttgatcggagaaagttttagtgggggatctgtacggagtagcttatcgcgaattagacctagaaggatcacctgattggttgagtggcgatttggctattaatttagatcgaatataagaaattgatcagaagaatggaattgtatttttttgtttttgtgtgcaggtttatatcgtctatcatatgcattgtatatgcaccggatccagccaagacaagcttatgcccgtgcgaacgtcgatctatatcatatcgatacttatgttgtatgttcttattgacatgctaggacattgagggctaagtgacttctaagatataggaattgtgtatatcaatatatgcgcatatataaacaaaggtaccatagttatgaagcttgcgtggggactcttattggaacttggcgatccatgtgggttttattaatatctcgttaaccttgaaatatggatctacatctaccttccagaggacagtattgtgatacccctcataacgttgcatccatgctttgaacctactttagtcttataaaagctaagtctagcgcatgtgtaacggcagtatgaagtaaaattggacacatcgatgtcatatttgtgtaaatttacatgcattaactagttaagcgcaagcttgacaagtacatatgatcacagccactttgttacatggtctgtgatctcacaatctcgtatcatttactcgaacgggtgagtacgtgttccccaccaggtgaggaacaaactgagtccaacagtctcgaacaccctcgagaccgcaccgacagcgactgtatcaaggggtcgcttctcagagaagagctggctcacaatctgtatatatatgtcagatgaattgcttggggtttcaaggcaggatgaattgaaaacgtacgcctggagcggagcttgcgaagaaaataagggagccaaggtacgcagcacccttgtagctcagtgtgccggtggcattgatcagtgcagccacaccgtaggtctgcacagcacttccaacgagggagcttccccaggctgcagctgcgccggcagcttccttggacttgatgaattcctccttagagttggcggcttgagcgcggtggtaggtgtcaccgaagacgggggctaggatgcccagggaggcagtgtgggtgaagattgtacccagcgcaatggcggagggcttcacgggagggagatctatattgtaagttgttagtttccaagtacagtcttgggcatgatgaggttatcaactcacagtgcagggtagtcatcttgaagttattatgagtggttgatgtagagtgacaagtgaattagaagagttaaagtactttaagtactgagagagggcgtttctgcaaccagggtttggaggtgacgtcgtcatgattcaacgcaactgtaggatgccgagggccaatgacgtcaactcgcatacggggttagctatgtataaccaagatttcgctagaggaaatcaagggtgatggatcataagttcagatgagctaccttgtggggaaagtaattaattcgttctatggctgtaggcgaatccttggacgtcgttgcggagtgttggggtgcatcattatagatcgccatctagatgaaatccctcaattaacttgacttgcataggcagaagaacttggaatttgaaaccagcttaaatcggctagtactacataggtagtaaatatcgtcaatgctgggctcctgtatgatttatccaccttcgaggtaccatcgccaggtccggacatgcatgtagatcaaggggcgattggcaagctggcaagctcgcaatacatgaacatattgcacaataccctatatctagatatcacgatcgttcgactcaattccaatttcatctttcttttcaattcatctaatcccaagactcgattgcgttatcgggggatctttcaagccgagcggggacaaaaagctgggtctagtccggctacagccaccctcttctacgacctaacagtcctgcggagccttcgggtgtatgaaccaccagtgcccattgtcaataacacaaaaagtgggcacttcgggtatttatttatagctattacttgcggaacttgcaatggccgctagaaactcatgaaaacgaaaacaaaaatgacatgtatttgcttgcagaatgtgctggctaatcaaacaaagacccgacaggaatatctgtagtaaaagattagactggagcgatagaatggataattggaaatgcatacttgtcagggtagccgttctctgtaccaagctcatacttagattgtgaagccttcgcagcagtgttgatattgcaagggctgggcggcaagccgttggcacccaacacaccctgaatgctcttcttatcttgcgcaaagagagccgcgaggccaccttcttcgccctgctccttaacagcaaccaattgctgctctccagcctctccgatcttgagaacgtcgtccttgggagcggccttgcttccaactgtgagcagaccaactgcatcggcctggcgcacagtgctcagttgagggtagctcctccgagcgtcccgcttccagtaggggttgtcggcaatatcgcccgcgggtatagtgactgggtcatcgtaggcaagagggggcaaagatcccggggtgggattacggaattgagcgttcagggggataccggtggaacgttcggggtcgacagcgagaaggcgacgaatgcgctcccagacgccgacggactggactgtgtatttctagagcgcaaagaggatcagcacctagcgcacgaccgtataggttggtctcctaatttctgtcgatatgaccgacctgcttgatagagatggcattgtttgtcgccttggcggcattcacgaaaccgcgagtcatggtgaaaagactctgccctatgatttaatatcagcccattgacacgctaacgccacgaggttgtaagagccggaatttgttctatgcccccgagtcatttgacttactgactgaaatccctgaaatccgtcaagagtccgtagcaagcctctagattgagccggtgcgtgaaggtaagtccggaggaggtacgatcaccggcacggattattttattaccgaaccaccacaaattcttgtattagtaattgaccgacgctgcaactttctatgatcaacgaaagctgagtctagttatgtcttgcactgagaaaaaatcagattatagagatatggttgaaatatcgagatatatacttggctaggcatctcggtaaccagaattatttgctatggaattcctcccaacaatgtgttttcaaacatatcgctatcccacactctctacaaccagacctccctcgtggagcttgttcaccccttttgcctttttctctcttaaactgacaacaaacacaaggaattttcttgtctaggacacttcgccggtgaattctgacctcaatttgctggtttggtagaggtcggactcgtggtgtttgtggcaattcggctgcaaattgaaagagtttttgatatagcccgtagcgaaactctgtttggctcttcttcttagcctgtcgctgctgcttatagacattttgaatgcgatgagcattaacaattgctgcatcaagaaagaaaaaaagtagtaggaacgacgtcttctcaggaatctcatccgcaggtggttgcagagcaggtggttgcacatcagatcagatgactgcacataatatatttgtggaaaacgtggtggcggaggtggtagaaaagcaagtggcatcttgacagtatgcttcgtacggccaaaacagcgaacctcagtctcatcatcaatagagatattgaaccctggctggtagtactgctgggcagctttctcgaatgaagaagctagaggttctagtttataccaccaacgtttatcctgtggttgagcctgctgctgaccatttggccgagagatatgtataaaacgcttgatctgctcaaagcgcttcagcatcatataaagatgaggaagatgcactggccctttctgaatatcccgccaccagtagtggtaaacacgtggagattggtgaagactcatatatactagagtaccaaagaagaccttgatatctgctatagtagtatccgtccaggcccgggcagggctagattcggttcctcctgcttgtcttcgctgagtatattcattggttgactagctaatgaattcgaagatatcgtcgctaacaaatagagagaaaagcgcggatgggctatcgatatcgagcccactaggtagctggagctgtggaggacaagaagacgggaataatagctgtggtgattccacaatatgttcgtcaagcttgcgcttggtacccttgggaggcatagcgggcaggcaggcaagtacgttagtaggtattgttatagaaacgcgctcaaacaggccatgatatccaatcataaattaggctaatacactaatcaaactgcgctaaaggtctttcccaaaagacagacgaggggttacatgggttcatgctaaatgccattcatcctatctatccatggaccaggctttttgcctacggagcgggttctccttaatgtaacgcaaagtaaaatacaacatacactcctgcaacaactagctagatcaaaaaaatagtcgtgcccgggatcgaaccgggaatcttctcggtgtgagcgagacgccatgaccattaggccacacgacttgagacgataattgaaagttatctttaccatnnnnnnnnnnnnnnnnnnnnnnnnnnnnnnnnnnnnnnnnnnnnnnnnnnnnnnnnnnnnnnnnnnnnnnnnnnnnnnnnnnnnnnnnnnnnnnnnnnnnnnnnnnnnnnnnnnnnnnnnnnnnnnnnnnnnnnnnnnnnnnnnnnnnnnnnnnnnnnnnnnnnnnnnnnnnnnnnnnnnnnnnnnnnnnnnnnnnnnnnnnnnnnnnnnnnnnnnnnnnnnnnnnnnnnnnnnnnnnnnnnnnnnnnnnnnnnnnnnnnnnnnnnnnnnnnnnnnnnnnnnnnnnnnnnnnnnnnnnnnnnnnnnnnnnnnnnnnnnnnnnnnnnnnnnnnnatggtaaagataactttcaattatcgtctcaagtcgtgtggcctaatggtcatggcgtctcgctcacaccgagaagattcccggttcgatcccgggcacgactatttttttgtctttgtgtatgaataatattttgtcttgattcattatatcttcgtactaattggtgcctatcgccctggaagtgtaagcctttctatatcttgcgagcttatatcttccatagtttgtattctatttcaaatacaacataaagtgcataatttattagagttgatctatgggagtaataactacggagtatacaaactgcgacagtaacttgggttctaataaggaaaagcagactgcccgcggctttagcaccaagaataggtagaaaatcttcaccacaagcaggccgatcaccaacacgcttgagataagccagaatgttcttttctggatcgtcggatttgggggttcccgggtcctttgggtcgacagtcccagtaatgggagacgaagggtttactcttgtaccgttggtggagcatgagagtatacattgtcaacatggaggaagtaactattgactagattattaacagattaacagattacatggttaactaggtagttgttaccgagtgcatgaaatgttcaaatgtacagatttcaaagctgtaaggtgagctctaatatagcgaaataaagctacgcttaggttgtatcgcgagtcgacatatgcggagtgtgtggttgaagaagcggaggaaagacggcgtgtgacctggttcaatatctatcattccaggataaactgcgacccagcggaaaaagtagacatccgcgtcttgagaatattacaggcctccagccttcaagtgctctagcacggcatccttaggcaaatatactccgtaatcgtatgtaacattgccacaaagcgccggcctctaggactcctaccgaggcccggggtggcttggctataactactgctgcaagtgactttataactaatgtattattgtataacctcagcggtactccataactataaaacccgattatggtcatctacaattcttgtcgctatggcgaaatatagactttcttatcgtctcaagtcgtgtggcctaatggtcatggcgtctcgctcacaccgagaagattcccggttcgatcccgggcacgactatttttttgtctttgtgtatgaataatattttgtcttgattcattatatcttcgtactaattggtgcctatcgccctggaagtgtaagcctttctatatcttgcgagcttatatcttccatagtttgtattctatttcaaatacaacataaagtgcataatttattagagttgatctatgggagtaataactacggagtatacaaactgcgacagtaacttgggttctaataaggaaaagcagactgcccgcggctttagcaccaagaataggtagaaattttgtctttatatgtgaacaatatgtagtcaattagtatagcctaattagtagttagtatctactacagactgcaagacttcctcgctctctacagaaaggagtatcttggagatatttacttttgcccgccgccagataatgcgcctagcggatgcccttgcgatatcggaaaggctcgcaatgagggaaattaactcatggaaaataattccgattctcaaatagaagagacaaaggatatttcaagccagtcaaatgttattttctagcaatgtataactataaaaagcttaaaccagcgtccagtaaaccattttcggcagccgatttgccgtcaaaccagtgctgtgtaaattttcttccatctaggcatgttttgattctcaatggccatcatagccacatattcggcctcttcgcggtcaatctcagccttgcctgtccagatatcggcattatgaggcttgacaaactcagtcctcttccaaatcttccacccagcaaatgccatgacatagagggggattccgatatatgaagtgataaaggtcttgtagtcgaaattgccgtatttttccgggttgtggataaacacaccgaagctgcgagtgaaggccaccaagactgagaaaaagagcgcaatgcaggaaccggtgattcccaggggagctttgtaggccagtgttgcctcgtcgacgccctgtgcacgtcgggcgcgaatgaagaagatgtgggtgatcaagagggagatccatgtcaacactgtgagagtaggtcagaataccggacacatttcgagccattttgggagggaacatacatccgaagattgacaccatgtcagtgaagtatccgaatacctccttggagccattggaaacactcataaaggcgagcaagcagaaagaagccgacagccccagggcatagactgggacaccagcttggttagtgcgagcgaagattcgaggggccttcctctcacgggcaagaccgtatagagtccgagtcgcaatgtacagatcagagttggcggcagaaaacacaaacactaagatacagccgttgatgatgtgaggaagagcggcgacttgcttcatcgccaccacgaaaggtgaggcggcagcagagctcttggccttggtagcgaagaccaggtctggagagttgtacgggaccagcataccgaggaagagcacgctgagaatatagaacacgataattcgccagaaggtgagcttgatagctttggggatggtcttccgggggttctgagcctctccgacagttacaccaatgagttcggtacctagcaaaaaggaaaattagaatgcgaaaggcggaaagttcaatcacagaatgtccataccgaggaatgcaaaggtggcctgcaccagtgtcgaccaaaaagcgaggaattttccaagggaaccctcggtatatttagtagcgaaggcaccgggttcgttccagtatcggaagcctctcctatcgtggtcgggaccaccaccaagtgcgaagatgaaagtgcacaaaatgattcccaggatgacaatcaccttgaacgatgagagccaaaactccatctcaccgaaaatcttcacgccgaagcagttgatcaatatgattgccaccatgaagatggcaatccaaacacccgggttgacattctctgctgacgtcctcggccaataggtaatgactagagcagcggcggtaagttgcgtgggtggtaggataatatatttgaggtagtagctaggagatggttagacatccggtttatactagcatgtagcttgggggttttactcaccaccatccgagagtgaatccgagagcagggtcacagaaacggccagcgtaaccagtgaaaccggaggacaatggtagccaagcagccatttcacccagtccacacatgaccgtccagacaacgaagcccataaagcagtatgcaataagcaaagatccaggctggttaggaatggttagtcaacggcaaaagatgaagcaagtgaatataacatactccggcgctataggcttcagtcagtagtgtttcataaacaactgtatccaaagagaactcacgttaaagcgctgccagtaccaacaaccaatccagtaccaatggcgccaccgatggcaatcatggaaatgtgacgagccttgagctctctgtgaagcttgactggctcatcctgttcaccttctttgaaatcccccgagttgtcaaagtactcaggctgcgcctcgatagtgttaatctcatcggggtgacccatcttgctgtaggccgaactgagaatcacaacacagagatgaagagaattgaccagactccaggagtagttgcggggggtgcgcggggactaaatgggtccaacgcacagtctttaagcgatctgctatctttcgcctcttcgagtaaagactaatattggagatttagtgactaggacatagttagttagctgtggggtgccaggtccacgagccagtatttcactcacgtaactttttggtcagagtggaggcataagcagtcagaatgcgatatatacttcgggggcctttgcgtccttgcgtcccccaagtgatcttattggtgtcttattttctccaagttatcccccgcaatacgtttttcccacagaatcaaatgcatgatcgcaaggaatattgtcccctattgatatttctggatgtgtcccctgtgttcctggatccgcttaaaaagccctatacgaaccttctaaggttggaaggggcggtccggccaaatgcgccaacactgtcggcggtgcgcttggcatccttggcggacttggcacggttacactcgggctccctactaaatgacagatctatagttacggagtagttactccatatactggtccacactgaatcctttatcagtggtcccctcttccctgtgggtatttgcctagaaccttggaagataaaaggtgtattacatattgtaagcaatctgattgtataacaaattctcagtaggtttcagtaaacttccccacaagtatttactaatggatattacaaaccttgaaaagcgtttctgatcatgataaacaggccaagccaggatgacacagcggtctcggtcaagtattcccaagaaaggatggagttggtctgaggttttgatttctacagcactacggagacgactagctttttgaatgggtagatgaatatcatttgagcaaatagcgggaatttccaatatgtattatgtagcaagtacacacctgatcggttctacctaagagcttctctgtctgagctcaattttcatctttttttgctctcggtgaacaaacactgggtcaaaaaaataccgcaaagtccttatctctctattcttcttggtatggagtacagtttatgtctcatgaaatgcacggacggcagatcagctcattcgggccttggctagaaggctagatggaactttctaaaaaaataacgtttatcttcgcggaacctcaagcgaaatccggaggcctttcgataagacttgcgtctcgttagggctgctatcagaatcaagctttgcatttgagtaactgcagaattctcctattatcaaactttatagttaaaattttaaccaacttcctaatttggaagtctggtcttgggaaccttggcaggtcagatctttcagtctcggcttgaagccggcacctacttaggaagtgagattcaatcctcttgaaaagtcatatttaacgcgttgtaaagatatactatgttggaaatgttgccaggctagaagcctgttaactaggtacaaatacgattccctcttcttttctgtcctcctctccgtcagttttctctctctgtttgtcgcttgtattgcattcccttggggcaccgagacagttaaattctgattactttgcgggataatgtcaaaatcatgacctgtgctacatccatactgtggagcgtggtatatttgtgtgcacatatatatatctctaccatcgcattttacttgacctgcagcagtcgacttatttccagttaccggattttattgttcttattcgtaattcctccattacaaatccatacttcattgctataagctcatctaataccggattcagatcggcttcacaacaagaatagtcgaccgctcatacagcctctatccttgacaatgtattaagatgattatatccaagaaaatcccgatgtgtttttggatgtccttatagatatttttatgtgtatataaacgccgcaaaaaccatgacctgtgcaggactttcctacatgtcaccagggatgaccaaacgctctataaattcctttagacggaagagtaatttttttttttcatcacaggccaatgtcataagaagcaaaggcgaggtttcattggtagaataaaggctagtcttggatacctcaccaaggtcttgcttgatgtcttctcctggtacaagatgagccacaaagttgaaggtgtctgtaaccttctaccctggaaagaacaacgtgattggttgtacttcaatggaaggtgcaaccgagggacagatcaggaaagtaggaaggtgcatattcaaggaaggtacgcgttgtctcagcgcagagaaggaaagaaaggagaagctaggcgagaaccccagtcgtgacgaactaggaagtgacgacggagcggtgcccagatggaaaggaaacgttccttctatactgggtaagcgagacaagcgagtaatgtcctcatttgcatggtttgttcagaaagcccacaaacccatgcgactggggtataaaagggtaccctcccccctgactcccttctcttcttcttcttcttctcctcttcccatccctctgaccaccatctctccgtagcccccatgagacagcgtcggcagagggacccgtagcacctgctgcccaacctaccacagggacatcaactttaccatgttgtggaagtccgtgtaggtcagcaacaaacatcaaacctggctttctcgtggatgttcctgaagtcgtggctctcattgccacttgacgagtcccacggaatacatggggggtgtaaatctccgtagccgacgactcgtaggtttgtatgcactctcgagctgtttgtaattaatctcagcattgtgcgcgcctctagttcctagttcccgttaatctttcaacattactgaacaccaagggtgttcattaatatgtaggtagtcaccttgtgctgtcatcggtgctcagcgggaccctgagctgcacccaatcgggaaactcgtgaccgcctaaagtccaatacatagagcgacacatgtaagtttattaaagccagtatatgagacttcatttaaattcttttgaatggatattctgacagacaaggaaaaagggggaacagaccaatcaaagtgagagtaaaaacaaaatatcaaactttaaagcctggtattgatatacaaagtaaaaagacacataaaaactccacggcggtcaggttgagtcacttaagtttaccatgcactatgaccgaagaggcaaaaaacagtccaccatatcattagttttaagagactaacggcggtaccacatgcgtgtgattctggtgtgtcgcatcttcttttgcagctggaagataccgtacatcaatgcctcagaagtgggtgggccttgggttttgttagtcaagttcaacagcacaagggcaaggcaagaggaaatgcttacatccaggcacgtagatatcgaccggcacaacccggtcacagcctcgaacgaccgagtaactgtagtggtagtagccaccaccgttggcacaactgcccatgctgataacccaccgggggtcgggcatttgatcataaacctggcggagagcaggggccatcttgttcgtcaatgtaccggcgacaatcataacatcggactgacgcggagaagcacggaaaatgattccaagacgatcttgatcgtaacggggggtagaaaggtgcatcatctccacggcgcagcatgcaagaccgaaggtcataggccacaaagagctttgacgagcccaattggtaatctgatcgagggtggtcctgggtgatatagggtcagcgaaggttccaaggcgcatccaatatcaaagccatagagggcaaacgaacaaggcatattgcatagcaccctcctttttctcctggctaggcaaaggcacctctcggcgagtcttgccggacgcggtcaattgctgggcgcctgctgatggttgacgctcgagcgctgtcgctgatttgattgacgaagtcgagagggccgccaagggttgggcacgcgggagagaggcaacgaaacggggtcgcgcagctgttttctgttagtgaattgacattgtcgatgaggtgaagaaggtcctaccgcacagagcgccagagatggcgggcttcgccatcggaagcatcttgagaaaagtctcttcggtggagatgaacagctagaatgaaaggtcgtgatccgggatttgaagagattagatggttgcagcgtcggccagtgacgacaagcaatatcgaattacaagagggcagaggtggcgggccgggtaactgcaagacaaggagaaccccaaaaaggttccgattccacagtggaagaacatgatgtataccagcggttcgagagagatgacgtaagctatcacctcgcagatcattggcccatcggctgtatttttcagtcacggaacctggtatggtaaaagcggtgagctgctcgtaaatccaattgcctgtctggtcattggctctgagctcattttgctgcctgggtgcctgaacccgtcttccccatacaacgtacgtgggggattggagacaaccactccactactgtctacactttgactacaaagtaaccgccccttaaaagggctgctcaattcgagagcattgtggacatgatatggagagctaatacctcccaaattagaactctcacctgatcacagtgccaagacaagggaatcagtccctagttaaaccacaagagcccaagtgattgcgcagtccccatatattgccacgtcaagggctatcgcagaaatggcgggtcccaaaattgcctgcattggcgtgatcgggaaggcagtacgtatcactctactaacttgctcgtctggaactgtccgtactgactcgattgcaggataaccgtcttcacatttccctgtttcccccgtattcggattccactatcgaattctccttcttactgaactcctgcctcgacatcttcgacatccgctgcaaacaaacatccattgatcaggatctaggtctactacatgcaattgacgaacgacttgcggcctatggatggttgacgaccacgggagtaaaactattgatcattgtggattttttcggtcaggaagaggccagcgctggaaaacaagcaggcgctgcgattaatggcctgagagattctgatgtcaagccggtgtgttatccctctgtgcctggcgagtgcttcaccccctaattatttcatacaggcattccgcgcattacagagcgcatacattcagcttttgcagaatccattctattcccccgacgaccacgtcccgattgccgggaatacagcttcttctttgtctgcttgccagccaatctctaacaaaaagttcgttgcggatgttaaacgtattggggaatcgtgggctccaggtacttctctgtaggaagagaacgaatgtcggatttgaggatacagataagactctggtcaaccaggcttcccaacttacattggtacaaacagcaacaatttcaccaggctgttcggataagagccatatcatttctttgtgattaagctacttttgacttccagtccgtatggcatataattcatgaaattctggatataatagaacaggcagtaaaaataggatcctttttgtcatcatgctgattcgcgttggtagtcttcattttcggcttcggcttcagtctgctccagggcaaccatgatctctgccatttcacgaggatcggaaatagcccatactccaccacctttggtgtcaactctcccgacctctttgccaaccaaattcctgccaacctttcctggtccaattccgatccaccgcttcactcctcgttcctgatgaagatagcgaatgctatcccaccacctgactgtgtccgtgcactgtcttgagaggaggtctttaatgtctgccttagactggaagggcaaggcagtaacatttgatatgcatgggattggtgccggaaatgtgatgttgatcttctcgacagcttctctcatataatctgcagctagcgccataaccgggctatggaacgggcagttactcttcaatctgacagcccgcgggtcgtaacctccaaattgacgcatttgcacgagaaggattctgattcgttcaatactaccacttagtacgatttgattttttgagttgatgtttgcgacgaccacttgttgaatcgatgagacgcgattatcgccgtcgatttcaatacccggtgattgggagccaacaaattgctgaaccgtgcgaagcagaccttccaggtgctcgggatgacagagaagtgcaaccatgccatatgtttcaccggattgctcggttaaatggcgtgtacactcggccatcatttccgcacgatggcgaactaatcgtaaagagtctccgaattcaagatagcctccggcaaccaatgcagagaactccccgaggctatgtccaagcgtcacaccgacccgagatttagtatcgaatccaaactcctgctccagaatacgaagtatcatgactgagattgccatgactgcaggctgtgaattttccgttcggttgagctcggagttcgggccatcggatataatgctggacagtttgaacccgagggtgctatccatttcgtccagaaccttcgacgcggtgtgagggaagtgttcaacccaggtgttggccatgccaacccgttggactccatgccctattgcgctttgtattagcggtcgtttgagactcaggggcaaaggggtgggggcgatactaacctgggaaaaagagggctgtgtgcaggtctcgtctggagggtaggatagtaaggtttgttgttctggaatttgtaggcgaaacttgcgatacgacatgcgcaatggatcttagttggaggtgacctctgcgatgcgacaagcgtgagagcatcttctctatagttgcaaccctaagcaaccctgtggggccttgatcttaaccgtatcaacacaacgcatacgcattgtggctatttcgtagtcgcgagggtgagatccgctatcccatggagcgagggagtgttgttcttgagtccatcctggtgtttacgaagggagcagtgagctccgtgtggggtgatatgtgggattcacgtgagccttttcggggtagtcggctacggaattaatattccacatccaaccggcaagtgttatgcatatgtctctaccggtagacctacaatggagcttacggagttctcacatataccgattctgtgcgtattctgagagcaaccaataatataaactgtttagctacgttctttagcttcatagaatatagctaaatacctaattgagattggtgcaaagtatgtatgctatggtattcgctctatacagagccccacatttcaatgagcagaatgggctggaataatgtgaaatgttattctagagtcaatttaaatggctattcgcatattatatacatctagaatatgttaccattctgaatgcatatagatccatgatatatagtgtatttaatagtacatgtaacttacactcatgtaccgacctgtacaatatggttattgtctcaccgctttcggacaaacatcctcgattgttattgaccaaccctatcactgctatcaccttgctccaatttaaacccatcctcttgggagagctttcttctcgctctatctctctcgttctctcaattacgaccttaaattaacaccgcagagtgaatcggacccccaagggtcaacaatcttcgaagctttcgtaggctagcgtgtgttcgcgacaggttgcgtacattgaaaatgttcgtcccaaaagccggtggtcgcaatactcgtcgacgccagcgaacaagctcagatgactctgtcaaaccaccaaaggccaagaggcagcgctctgtcctgcgacgcccagatgaatccccttccgataccaatctgggacgtgagatcgcaaaattagcaacacccactgcgccaaacgatgacattacccctacggatctgatgaacgatttgcatatatcagcccgtggtgcgaaacaaggcgatgggtctgggaataataacgaggggacaatcgttctggtgggtctttcacatctttgcgcgttccttcagaccctcaagtccaaagtgctaacttgctggattcaaagtcaagcacagatttctatactgtcgatcaactgccgtctttaccagatcaaattcgtggcttacaatcaggtatctcaaattctatagctttcctcaccttgggttgcgctttgttgacactcaccctttgaacgcagaacccctcaagtgctttttcggaactggtcatcactacgcattggctttgacccgctcgcatgccatcgtatggccctactctgcgcccgcttcttccccgtccccgtcggagacgttcacggtatcgattccggagtcttgcagagatcccaaaggtgccgtcccactcggagttctattatccacggccacgggagatcacccaggtctcctagtgatcatcccttctacaggaaaagtcatttactgggagactgtatccagtgccgcgtcattgggtttatcccggcaaaagcagaatggcatccaaggatccacccctggcatgctttccggtgagtatgccacggaaatactcaacggggagccttcgggagtgatcgtcacgttctcgtccggacgagtagcacacatcaccttgagggacccccagggaaagccttcagtggtcgtgaatttcctcagaagcaccgcaggaagtggaggcggtggaattttcgggggcctcaaaaacgtattcgcaggcgggtcatggagaaaagaggttactgcggtccgggccggtggttctcatcaacgcggccagcgagatatcattattgcaacttcgaccggattggttgagatatgggacacgcattggaaccatgggaacaccctcaaaaaaagatacgatctcaagaacgaaattatggacgccctccctgaatatcatgcacagccgacaaacgatacagagctcaaagtcatggactttgtgttctctgccctgcagtctttcgacgatgctgtccaacttcccgatgggtcctggcgcctctttctggttgtcaggtcgccacaatggttggaaactaggacgctattcgtggttcaagttcacctatcaggaaacgaatctcgtgttatgtcaacacatgccgtggatgttcgccatattcctgtctcccaacttgaagcttcgaaacccaggctatttgtgccgaagccagaagaaacggcttttatcctcattggccagtcccttgttattttgtctttaacaagtgtcgaagagactccatcctcacaactgcttctcgattccaacaacctgcctctgcctttccaagataccatccacttccgctccggcacagaacacgaaatcctggggtccatctcagaggaccaatcgaacgatttgccttgcgcagcatgtgtgcttatgcttcggaatttcggtgtaattcgtgtgacggttctccctcgtcctagcacagaacaagatgtcgaagagcctcaggtcacagcaaagcacaagcttgagcaggcggtcttctttgggaccatggcaaaaaatcctttgaatttatccagcgagggagacttgaacttccctccatcagaaatggagcaagcatctttggaaatctgcagggagctcctccaatcagaaactcgcttcattcctaccactgctatttcactagagcaaaatctccgcttgagagcaaaggcactagatgatctcgcctcattactatcacgccaagggaatcctttgagtcggccggcaaagtgggagttgctgtgggctgctgaaaaaattgcagcacaacgagctatgtggaagattcaagaggcctgcaagacaaaaaatggagacgaagaaactttcctcggtcatgtcattggatctatgcacgaaaaattcaagactccaatcaacgcccaacacggagagactgatccggtgcgtcaatggttcctgagggattcttatcgcatggagcatatcatcccatggatcaagaacgcaatcaagtccggtcggggcaatacctccaaccctgcgcgcgcattgtcagagaagatcctggcggcgagtgagctttttctggcggtcaccgaaactgctttcagatatcgcgatgagcacgttgcactttatggtcttcatggagacttcctggaggatggtgtgctttctgatggatatgaagatctccccgagttctggacatcaagagctgttggttactctgaagcagggcatctactcgatttagaactggatagttgccggtcatggataacacccgcatcggctgctgatacccctgacacacatgttttgaatcaagttgcgagaaacagctatcgacaccttcgcgtgatcggtcaaatgcatctcgagcggactcgatggctctctgcgcaaggagatcccaagctaatggatgaaagtgtctcgattgagcaggcccacgtcgaagaccgcaaatggcaactcttcaagctggctggtatcggccatctcgccgatgccatcgaattagcagaaagcttccgagacatgggagcattggtcgagttaatcatcgagctccaggaccaaaaagcaactcaaaatccgcgcgcagagccaccaattgacgtttccacgactcaaactgagatcgatgcggatcaattgatcgccaagtatttcgacaagtttggtgacctatgggcggatgcatacttctcccggcaaattgctatgggttatccaggaacgctgtttacgatgcggaaataccaatccgccgtcactcgattccttcgaagtaaccccgcatattctcgcctgagctggattaacgatgtcattggtgaaaacgattatgacactgccgcagtctcattggagaatctagcgattggcagtgaaaaggacttgtggagccaccgtgtagagatctcgatagccaagctaggcaaactagcgacgcaggagcaaatggattcacccgttgtggcttctactttgcaagaggatttgaagcgtcttgaggattacgttgaggtcgatggaattcaagacattctctatcagtatgttgagcctgtactgcaaggtgccattgacgaaaaggcagaacttgaactagctctcggtcagtatggagaacatatcttcgaagatcggccatcgctccatgaaatcttaagcgacgctctctctaccttgatcgacaggcaggttgtcggtgccgatggcctgattgatatcttgacgttgatgggccctactcagctcgcagatgacagcgagagcgagattgtacgaagcgagttccatctcgcattgcaggttcttgattacggacgctatggccagcgagatcccgcctatctcatggctctacagaggttgatctggcgacggtgcttgatcaaagatgattgggtagctcggggcaaagctgccgaggggcccaatggcgatgcacacaactcggtcgccgacacggcgctctaccgatcacttactgcatgcttggaaggtgagtttgttccgaatataagcacttggactatcgagctaactaacgtactatatttagaacctcgaaatgctggtccacactctgtttacacagctctctcgccggcggaggctctgatgaccgattccgattccgatattcttgtgtcacggttccgcccagagcaaaaagctcgtgtggcagccgatcttcagaccgagaatgatattttgcgccagtgcattgatgtcggaaaacttgatttctggttccaaaacctccgggaaactgctgaggtccatatatctcctcccaaatagaccgcctatgattgacggtgaaattgctggagcaaatgattgaattttctatacaattgacacgggtggcggatgaaatggcggcgttttcaatattatcactcggttatccggtggccgatgggtcataatatgttgtatgtatgaaatctcaagagatatttcaattgttcaagcttcagtaagaaaggccctaaagctacgttgtacttgatgaccctcatttttagtgaaatatgaaagtcatgtttgatttagtttgttttctcagactcccatgcaatagatactggttcggggaaccaccgagtcatggagtcacgatatgatccctagaatttaccttgttcacgttcgacttactcgccatccaaatatcggaagctcaagtcgtcacagcgccagccgagactctttaatacttcctgccctcacgatcagcctcgctatcgttgctgctgacagtatcgaccttggtcacgggattatcattcccggcagccacatcagcttcaccaaggatctcttcctcgaacaccggctctgggtcaatagcctcgaacttagtgttgaagtcggccagaccttgggtgctgctgttggagcgacgcctggcattggcgaacgagtagtcagtgtcttgcatttcgtcgcccgatcggcccctgtagcgagagaaatagcattagctagctgcacacgctttattctgacgtgcaggaattaccaattgcctttgccgcccccgtccttctttgtcttgcgcggatcagcgtcagttgggccggacttggcgaagtagcgtgggatgttttcacggggtcccgtcgcgctttcgacttggtgttcgcgatcgttcattttatgggaacgagtcactaggagttgagtcgttgggtcagtggaatgttcactggggaattgagatggcaagtatataggtatggtttgatgccaaggtatagaagtatatctttcacggtagaagcttactgttgtcgatggtatttgatgtgatggtagatgaggaattgtgtccaaggagagatgggaaatgaggaaaacaagaaacatgagagcaccaggtatcatgcaatccgagaggggggcgtaggactcgtgacctcatacccctagagagtgcgggggttggactaatgggggctccaccaaccttatttcgtctaaacatcgtcgagatatacaaacagtcttgatgaaaggaaaacaggcatgtatttcttgttctttctttgaattgtcgactcaaggccaagcaactatgcaaccaatgctatataagaagcactcacttcctacctttgagtttaactagcatgtcgattcagtaggcatagtctgatatgacatatctatatcggtattctccttctgagattacgtattctgtccactcaaccaggtcctgattgtatattgtttacaattgcttaactattgtgagtaatataagtagatatagcttcactagcactacataatgctatgttatgatctttgaatatttatagttatatttcccctttccccagtctcatattacatccttggcttatgaaggagctcagcatgaaaaagaatgtattctcagagatcgtacataacctcccggcactagcgggagagcggagcataggagcctatcaaacgtatccactaagaatgaatagcttcaataatacacccactttaatacaattgttttcgtcctcaaggcctaagacctcggatgctccgcaatgatagatggcagttgacagtgttattgtatccatatgtagtgaatttacccacatcagaatttggaacatagcactaggacggggatcatccatttgagatcaagattagaccgacgacagggctagaactgacctgtctccccacatttggtactagacacacggaagatgaaccgagtatgtatatattatggggcgaatgaggtacattgctgggggcgagggcatatagttggactaagcatcacgctcccaacaagcatactactacacggtagcaaactgaaaaggattgaacatgaatgaactactacccttgaatttttgggatcatgtctgagactggctacgcgtagctaaacgccggttcaaatctgtcatacatatttgaacttttttcttttcctatgaccagaagacaatgatttgcccaggctgaccagtacgtgacaccacttcattgacataacctttaaacattctcgaggacggtctccttgaactcccgctcaaccttctggcccttgtcatcagtggcggactctccgtgcagagacaggagagcaccgaggtcgaacttgggagacttcaggagcttaaccttgcgaatgtggacctgtagacatgtgttagcaatccgtgcgtatgccactctccaggttttgtggggggaaaaacgaacattctgcagggggtagatgccctgggtggacttctcgatctcacgtccaataacctcggggatgagcttgtgggtgagctgagacagagtgcaggtggaagcctcgcgctgaatgatctcggtcatcttcttgcgaatggcacggatctgggacgaagcggcgtaggtggtcttcttgatctggttggggcgtctcttggtgaaggcaatggcgaacaggcggaggaggtagtcgtcagtggtcttcacggtgatgttggcctcaatcagagtctgccacttgcggacaagagaacggagcttgtcggtggtgaagtcgagaccgtggaagttggtcaggcagttcttgccctggatctcgtcgacgcggagcttgaccttgcggaaggcgtggtcctcatcgttctggaggtcggcgagggagacctcgaagatacggcccttgagggagtcgttggcgttcttcaaaccgctggtgcggttgaccagagtcttgccgacactgataattccgttagccaatccaactctaaattcgccatgttcgattcgggtggtgtgcatactcgcgagtctggaaggtggaaggagcctgtcgacacgattagcattgggtacgggacgggggaaggaatataacgaaccttcacagagtactcgtccttgcgggtgaaggggtcgactgtgcgcttcttgatacccttcttacccttagataggcgcttgttcctgaacgatgaggattagccgtgtgttcgtgaattgaatggatgtcgtagatgcgcaagtaattcgataaattgaaagcaggaaaaggatggagagtagggcgcttactttccaacagccatgattgcgagttatctgtgtgttgttggaggacagacaaaggtatcgcaccgcgcgctcagagggtttcgacactcgactgggagggttgaaaacccacagaaaactcggctaagcgaggcgcgggccctagctgattatgtcatgaaccatcgtcatgtgatcgaacattaaaaaaaggttccactggattatcattatgtaatcacattatgtcatcatcgtgagtcgggccattgcattgcattacagtaacattcatacttgtcagatcactttgcgttgtattattacaagaatgtactccgtagattgttggctgttacaatagcgttcgtttgaaatgctatacactctacatgtgtatacatacttgtatgcctatgtatcagatttttgccaaaaccaatcctctttcctccaatccgcatcgagtcctccaaagtttcgaatagccaacatagaaatttccattcaatattctattgttttatataatgtagatcacttcgtggaaatcgccactaactgacatcacctatcggaagctggagacttattgttccgactccaaactaggcaagtcgccttggcatccattccgcgggcctactcccgcgcgagtcaacgctcctcattgcttcaactttcctctcatcccttcttatatttcaactttgtcgcaggttaagccaatcatggtacgtgctatcgaatttccttccccgactgccctgacccgcccgacccccccgaccgtggatagatgttaatttaaacagggcaagcgcaagaagtcaagctccaagccccaagggcctaagaaggtaaacgattcacaagtcgccaggctttacacccagtactgactgtgaaacatagagggagcctcttgctaccacattctcctgtctcttttgcaaccatgagaactctgtggtcgtcaagctagacaagaagcttggccttggcgatctatcgtgcaaagtttgtggtcaaaagttccaaaccggtatcaattgtgagtcgataattcggcctaaggcatcagtcgtaactggtttgactaacacaatgcttcaaagatctttctgctcccgtggatgtgtattcagattgggtagatgcatgtgatgcagttgcgaaggacactgccaatcagtatgatgcaccggtttctagtcacttgggacagagagggatcagcaagcagggcatatctggagagactgggcaggacgatggctacgatgatgatgaatactgatcatgggatgacggcgaacggcgcattaaggcacgatatcaacaatagtcgagttgtgagattcttgtatgtacacggtatttgatattcttgcggcatattcttgttgcatatgtttatcatatagcctaaaccccaagaagcgtctcacccatctagacctctaccccactaccggccatcaagtcaactctgaataggtgacttgtatgggaagtggaagtgccttacggcacctggaacagaccaagcaatggatggataatggaatactgaatttctcagaatttccgggtgaccttttaaccatcaacgtggtaggaaacatgacttttacatagagtaatatctgtcgccgaaatctcccaggccggggataatatacctatcaatcagtcagcatgtcaatcacaacatccaaggggtgcgatattctcacttcttctcatccaatccttgatcaatgaaagaggtcacaacccgaagtttagggaatctctccgcgaactcagcaacgcccgacgggctggcaatgaggttaaggaataggatccggtgttcagggacgcctctctcgatcagtgtctccacggccaatgttgcggaaccacctaggaaaaaaatcagctgggtggcaaggggcattgtacaacaagctcagctcaccagttgcaaacatggggtcgaggagaaggacccatcgatcagcaatgtcagtagggagcttatcgtaaaacagtttgggcatgcaagtttcctcgtcccgctggatgaggattttcccaatgcgaacagatcggcagcagtcgcgcaatccttgttccatggcctcgcctgcacgcatgatcgacacaccacagatctttccttcgaatttgacaccgaggtaggaccgtccaacgggggtagtgatagactgctcaacaacgggaaggtggttcaagccttcctccaccagcaatcgaatgatgcggttagaatagaagatgaaatcggcacggcaggttctcttatctctgatcatcctatttgtagtacaaaacatgagtctagggttaccttccatgtagaaatgggtcctcacgtcaagagagcaatcaactggggtgtttgaggtagcacgtgcacattctcgtaggagacttcctttgagactgtcgcagtgggcttctcgccatcgggccgatacaaaggaccaacgccctgtgcaggagaaggaccgctctcgggtttgctagccatgattttgttgcgtccaaagatgtgtgtgcgtgtgtgtatgtgggtcgtaggactagaacaaagagaaaaaagattggagtacgcaagttcacctaagacaagtacaagtagctcaaagtagaaggacaagagtccagagaggggtatataaggacagtgagttgtctcaaagccaagagcggggaagcagagggttttcttatcttttttgctatatctggaagctataccgcagtgggtgattctgccccatctcacccccctcggcctcttatcacctgcatcatctccccaatcaaacccccagacctcggatgtgctcaattattctattacgcgatcttctcaaaggaaattgcctaggtaatctacgcgcctcattgccaatcacctaggggtcactcctttgatgactgtgccacaccctttgggcgtgtgtaagcttcattgaacacgcaaggacatggctgtttcaagaaacgactacgttttactcaatccaataacccaattgcccatcgccaaaccttgattgccctctgagaaacgtatttcgccatcgaattcatcaaacaacgcgtgcgcatctggtttcgcacggtttgtgaaccgaagatggagaactcacaccctcgcaatcgacgactcgtaacctacggctctgctgccaaaagccaacccccgttgaataacgaaaggcctgtacactcatctgccgctaaaacaactcctaaagatatgcctttgcccaagtcgtcacgtctctcacggcccttccacaccaggttacagcgcgacaagaatggagataaacaaccgtctggatcggaaaaaatgaccacgacgcgaagtcttacgcaatcaaaacctatcatggaacctaatgtgtatgacttgccctcttcagacgatgaacatatgtctatggtccagagaaagcgaaggcgatatagccccgatggaaacaaagccattcctgtgacgaagccatccgtgaagccaaatgagacagaaatgagagatcgtaaggtgtcaccacaaatggagaagagggttcccaatagtcggtggccattagccaaaaagccagaagccgatcagcagacaaaccccgcggggtcaacgtcgtattcaagggctaggaggtctgtgcggaaccagaccaaggtatctactctcgagaatgaaatggaaatttcaaccgaagggagctttggggacggagagtccgtgcgaaagagctcaccggacgtcaaccagggctatgccactaaagcgaacaccacccctggtcgaaggaggctgattgattcgctcgggatcacggaacacacggttgaaacatctccagcgattgaaacatcaccggagagtccctctagtagtcagccgtctcgagatccagcccccgttgaccgagcttcgccaagtgcagctgtgaatgagtgtcctgccgaaagccaaattcaaggatctcctgcctcggtgccatctcatttacgaggttcccgcgtcacctatgcccgccagcgttcttttttggatgacatggttatgtcagaggacccttctatgcaggatgctccctctggcccaaagcaccgctctcagtctgtccaacgtcagttgaattacgaggctacttccagtgcccgtttaatcgtgccaattgaggataccaacgaggatggatctgtccgaagtattcatgagctcagacaagctgggggaaacgctcgttaccgaggcgccgtcgaatctatctttgaggatatcgaagatccgcaaaactcattgacgggtcgatgcaatgcaattctccaactgtgtggtaaacttctggatactggtctcagacggcggtttgtcgagtgcaattttgacaaaaggcttgtggattgtctatctatggatcttcaagtggtccccactattctagctttctgtgcctacgcactgggatcatcggatgggcacatgtcttatgttcttgcaacttccgcatggcctaagctcctgagtgcttcgcctgccttattgggcatgcaagacgatatactagtgaccgcaagagctaaagccagcggccttccccggcacttgcaaaatacaatccggggcactattccacagatatccgctgtgctttttcccgataccgcatcgtcgaagctgtccccatgcactctggcgttgtattgcctgaggtcgacgatctccacgatgcaaaccaagggaaagaaccctagcctctccacatctcttctgaaacctttggttcaagtgctcgtgtccgaaagccagcgttgtgtttcattggaaaaattacacccggagagctctcaaatactgtgcatgggcttttcaatcttggaagcttctactgcattggctgaatcgctcacaaaagagcaatgggatattctaggtccgctctctgaacttcatagcctgctctccttggagtcgggcactgtcagccaaatacaacccctttacattcgacttatcttgaatgtgaccaacagcaacccctccttctgtgatagatttgcaaactcggagatagttggggggctagtccggattgtctctgcgaactttggtgacttgaccgaagatgcgcttggacaagcgaataattctctggacagcgtgatattggcgctcggcgcacttatcaatcttactgaacagagtgaagcatcaagaacgatttttcttcactctgctggttcctcgaagcctttccttgatcaattgttgcatttattcatgactcatgtcgattccatctccacggtaagcttttgatcttttttgatttcgcattttgccgacgcattgaactaactggatctgcttaggctcattcggtcttggaagtacaccacaatgttgccgtgggatatttggccgtcctgttacttacactcaatttggatcctgatacccgatccaaaatcaagagctcactcgctcctaatggattagcagtggtgatatctaccgttgatgaattcctgcaataccatcagaagattgaacaagaaacctccactttcccaactcaaggacaaccggcgagtggtttcttatccagattacaagaacttgtcactcggattcggttggcagagcaatgaggagcgtctatccatgttttgcttgacggcagataagtgcgcgcttggtcttcttctaccggcatttcttcagactcgatgacgtggatttcttggtctgctggcagcttttgataccccttccatcatcacttttaattgaaccatttacgctgaaatgtcctacattcaatatccacctgggcagatgtccatcattgagatcgtcgtaagataatgacctcaggtcaaaccagacctcaatgttcaaaaaaagtaggattcagtagtttttctaatacagtaattttataaagaatatcaaatcgatggtcatagaccctgtggacctacacgtaggcaattatttatagagcgctcagccctgcctaagtggagttggagaaactgccgtttgcattgtttgcaggtcacaaggagttggagctccgcatgcttcgagggatttgccaccccccggcgacctcgtttctgaacatgtgtctctgaatatctcattgatccagttccatcaatcaaaagatactgtctatctgactttatcatcatcaatatctctcattcacattggtggtctagctgaatcttaccgcactacacaagatgccttccgcgcctaagcagagaaagatcgcaatcgttggcagtcgctccgtgggtaagaaagagcacctttttcacaacccaaatctctgtaattgcgaagagctaacacttatcttggataggaaaatcttccctcacggttcgctttgtcgagcaccacttcgtggaaagctactaccctacaattgagaacacattcagccggattatcaagcacaatggccaggactacgccactgagatcgtcgacactgcggggcaggtaggtgaaccctgtgcgagattaccggctgtttactgagactattcattctacaggacgagtatagtatcttgaactccaagcatttcattggaattcatggatatatcatcgtctattcagtggcatcgcgccagtcatttgacatggtccgggtgattcgtgacaagatcctgaaccacctcgtcagtcactgccgttctcacaaccagtacttacgaaccagcgtctaatatttcctatttcctctagggagcggatgatgtacctcttgtcatagtaggaaacaagagtgatctcaaacccgatcaccgccaagtcaccctcgaagacggacgtcagttagcggaggagcttcactgtgctttcaccgaggctagcgccttccttgatttcaatgtctcgaaggcctttgacctcatgatcggagaggtcgagaagtctcagaacccctcccaaccaaccggcgacaacaagtgcgctgtgatgtaatacgggagccttctaccggaacgcgtgtgtctctctcccggggatggtaagcgaagccatctctggatctctggatccatgagtcaagaaacgtggagatctctttcatcggagctgacaacactatatcttgctcttttgatgtccacccaattcagatctacggatatcttgtttgctaactcgattattgacttagagatcatcaacgccaatttgataacaagcttgatggcttcttctcgaggccttcctcttctctttggccctatttctattgcgtctttctgaaccaccggggttattgcatgaataatgagttttagggtcgaattatggaacatggatcggtaccatgcatagagtaatgaatctcaattgaaacaggcttctcgaagtattcaaagtgttgaatctcttgatctatagaaccatccgtggccataactagcctgttcggaagtaaaccggggaacccttatcgattaagtaatgcgaccccttgaggcccaagtgcgtggaggcacgcactttgattttcctcgtttttacccctccacaatttgagtcacccctctaccacttagactcccctgaacctctgaactccaatcgtcaatatgctggacctcgccgactttgtcactgagcgcggtggtgatatcaagaagatcaaggagagccagcagaagcgatttgctccagaggagaccgttgatgaagttgtcgcgctctatgaagaggcacgacgcggtatgatttctatttttttaaaagactagcgaaatcttactgacaggtacagcccgatatgaggtcacacagttcggttctcaaatcaatggagtccagaaggcaattggaatgaagaagaaggtaggcattttctagctagtctagagtatggggagatgcttatgcgttctcagaacaaggaagacgcaaccgaattgctcgcacaaaaggcagagcttgagattaagaagaaggagcttgaggaaactgctgtcgccaaggagcttcaacgcgaccgaaagattcgcacgattggaaactacgtccacgaatccgtgcccgtgagcaacgatgaggtatgggttatcaagtcgcctgggaattgaatgcgctgtgagactaacaagtctatttctggctacaggcagacaaccagctgatcaaaacatggacccccgagaacgccgaaatgcagaagccaggttgcctctcccaccacgaagtgttgactcgtctcgatggatatgacccagagcgtggtgtcaagattgttggtcaccgtggatactgcttgactggatacggtcttttcctcaacttggctttggtcaactatggtctggagttcctcttcaacaagggctacacgcccaatcagccccctcaattcatgctcaaggatctcatggcgaagactgcgcagctcgagcaattcgacgaagagttgtataaggttaccgagagcgaggataagtcgaccgataagtacctcattgctacctccgaacaaccattgtctgccctgcacgacagcgagtggctccaggacaaggaactacccattaagtaagccactcatctcgcacaggactaagcccttttgctgataagagaaacaggtatgccggttacagcacatgctaccgcaaggaggctggatctcacggcaaagatgcctggggcatcttccgtgttcaccaattcgaaaaggttagcatagatccaaatgccctggattttcgtgttctaaccccatgcagattgagcagttcgttcttactaagcccgaggattcatggcaagcctttgaggacatgatcagcacttctgaagaattctaccagtccctaaaactcccttacaacattgtcgccattgtctccggcgccttgaacaatgcagcatccaagaagtacgacttggaggcctggttcccattccagcaggagtacaaggagctcgtctcttgctccaactgtaccgactaccagtcccgcgctctggagatccggtacggcgtgaagaagaccaccgatctgaagaaaacctatgtccatgcgctgaactccaccctgtgcgcgacggagcgtactctctgctgtgtgctcgagaactaccagaaagaagatgtaagtgtcgaaaggtcaccgggtgaatctgacagtagctaactatcatttagggtatcgtggtcccagaggtcctgcggaaatacattcccggtgctcctgagttcctcccttacaccaaggagcttcccaaggatagcacatccaccaaggccaaggggaaggccagcaagggcaccgatgatgccaccaaaaagatgcaaggtcttcaggtttaaggagatatcccacgatgtaccttgagatacaaattacaaattacgatggtttagttcatgatttacaggcatacgtacacaggaatagtcggccctgcatcctgcctctgtccttgacaacgtagggctttgataatctgatctatttgacaaaggatgcatatattaaggatttttctatttaagaagactccagaagaatccctacaacatagttgatttaacaaagacattcaaaaagctatcccgaagatcatattaacctaaatgaatcaaatataaaaagctctctagactgtgtgttttctggaaggaaggcatcggctaagtcccctgatccaaacttctcctttgaagctaacgcaagttcaatcctcttttctatactgtgtcattcctccatggaagtcaaaactcaaggccaaagacaggttaaggagcaaggactcagaattgtgagtgagggtaagaagaatctgccacaaaatgtagtatatagggtgaaaaaggcgtaaaatgtgattcagatcttaaatattattctgaattagatagccaaagcagcaacataatataactagcaaacaaaccaatataacaacactggagttcacaaatatcgagcaattgtaggacttggctccaaactgcaagcaattttcaaaactcgaatcacttggagcctctttccaaccgccaagggaatgcctttttccaataccacactactgatctcatcgttgtcagctttctaagcccaaatatacccggcttagagaaataggcctctgtcattgttaaaagatgggagggattttcgctgttcaagccatcctccaaatcttcctcttcggttactggatgaccacgagtagcttcacagcaccaacactcagtcgtacagtgcccgatacccctgcccttagctagacagcgcttttcgcaacagccacagcttcgaccacagcagccacccctcctcatacaagcctgaataagctcttttcgaagataccaagcagggttctgtcggatctcatcatatatctttctcaacggtctttggggaagcatactttccgtattgtataaggcctgtgctatgttccacgtaacctctttgatatcctcgaggtcgctctcatatacttgaatttcgtccttggtgggatcttctagtgatctaaagtccttttctaaccgttcatgggatttgtctggtcactcgtgaaaaatattcgagttgtatgatcgtcgcaaagagcctcgaaggtatttgaagacccctgccgtactcaaagagtcgcttgttctcgtcttggtaattccgaacaggcttgaagtttccaaaggaatcgaacatttgtaacggatctaatcccagcaacgagattttcggcatggtcttgcggtccgccatgttctaagtcatgttagtatgattgtcacgtagataaaggtgggaactatttacgaacattggattcgagtacggagtagctgcaagttgtgagttatatctaggtaaactcgtgagttgattttcaatctaccggtaaatactacatcatctttcgccgcccttgcctaaagcagataagctcatgcaataaacatgtgatctgcatgtgattagtcaaaactttgaattaaaaaaaagaaaaagtctttgccccgcggtgcccctccataggatacagagagaacagagagattatatgcagaatagtatatctcaacatctatttaattatataaatagaatcaatcgatagtaatagctatatgaagtcagtgtaggtatgtagtgcaaatggtaagtccccgaaaccaaaaaaatcatcaagtccgattccggagaccttggaggcttacttaatttctattaagagtcatcccatatgaatcatatccccatcctcctcttccctgcttctttctcttcaatctgctacaatctgctacacacttcaatcatgtcaatcgcaagagatatccgtcctcgtcaggacgattccttcctcgctacctcccccaacgcctccttccactccccatccagccacagctctgtcctgaaccgtacaattccagtcaatgctaagcctctgaagccattcgccacagaagatatcaaggtcctgctcttggagaatgtcaaccaaactggccgtgatatcctgtcccagcaaggctaccaggtggaattcctgaagtcttcactctcggaggatcagctcattgagaagattcggtgagtcgcaatttaactctctatcggtgactcacttggctcatgaattctgttgcctttcagggatgtccacgtcattggtattcgctccaagacaaagctcaccgcacgagtcttgaaggaagcaaagaacctgatcgtcatcggttgcttctgtatcggtaccaaccaggtcgacctccaatatgccgccgaccagggtattgcggtcttcaactcccccttcagcaactctcgcagtgtcgccgagttggtcattggcgagatggtcatgcttgcacgtcaattgggcgaccgctccaacgagatgcacgctggtacctggaacaaagtgagcaacggttgctgggagattcgaggaaagaccatcggtatgtggcattcttacaaccattctgttgttgggttgtttagctgacttttcaggtatcattggatacggtcacattggtgcccagctgtccgtattggctgaggcaatgggcatgtcagtcatctactacgatgttctcaacataatgtcattgggcactgctcgccaggtgaaaaccttggatgatctcttggccgaggctgatttcattacctgccacgtccccgagattgccgagaccaagggcatgattggacagccgcagttcgagaagatgaagaagggaagctacttgatcaacgccagccgaggaaccgttgtggatatccccgcactgatcgatgccatgcgcagcggtaaggttgctggtgccgctctggatgtctatcccaatgagcccgccggaaacggtgactacttcaacagcgagctgaacccatggggagctgacctgcgctcgctcaaaaaccttattctgacccctcatatcggaggaagtaccgaagaggcgcagaaggctattggtgtcgaggttgcccaggctctggtccgatatgctaacgagggttcgacccttggtgctgtcaacttgcccgaggttttcctccgttccttgacaatggatgagcctgaccacgctcgtgtaagttttctcgcgcagtcagtcgggtttgcaatgatactgatttggcctaggtgatctacatccacaagaacattcctggagtgttgagaaaaggtagagtacatttgattcgaatgctgtgatctttttaactaacaatgccacagtcaacgagattattggtgaccacaacgtcgacaagcagatgactgacagcagaggcgatgtaggtttatccgtgtttctcatacaaaaacccacgcagaaacttactgttaataggttgcctacctgatggccgatatcagcaatgtggacgctgctaccatcaaggatttgtataccagactcgagagccttccttgtaagactacatcctttctctttcgcatgaacttaaaagctaacaccacttcagctcgcatcatgacccgcgtgttgtactaaacaaccgattcaaaaacaagctagcccccgggctataatgctttaatcaacttaagactgatgaaccctataggggctcaatctcaattgcatgggacactctcaacgaggccctgggatactacaaggttgcaattgccaactccttagtataccgagttggatacgactgatgtaaaagcggtttagtgtatattttgtgattaccacgcaccatctactagagaaaaagctatgacatgaatgttttcattttcattttcatctgccatctgactggctcagtaaaatacattaagtgaaagctcgctagatatcatgaccctagcctcgactcccatctctgaatccgggactgcggctccttcttcgggatggaggatcccggcggtaatcacgtcgacctgtcgagcgccaatcggcgtttgaatgcgagccatgctcaccagagtctcgcgagcgatcgttgccgcggtcgccgcgctcaccgcggtcactgccacggtcacggtcactattgctgtagttaggaacgtaagagtccaggttccctggtctgggtcctgggcgcccttgtccggattgatttcggcgatcgtctctcccatcaggtctgttggactgcggtacttcccacggcgggcgggttggtacgggaggacgcgggggtaatccgatatctcgttgtgtaggtgggaaaggcccgcggcgttgcgggtttccgtgaggtgggtggtgtccatgatttcctggcatatttggtctgcctccacgaggggggccggggatgcggccatgtcgggagtctgctccgcgagaaccagagcttggccaagcgccgttgcttgagtcggaaacgggtgggggaactgggggcattggcacgcgctggctgcggaacttctttcggtcgagttcgtgggaatctgcgaattgggggatttcgccgggtcgcgctgggagtgggggcgtggtgaagtatgggtgcttcaatgcatccatggcgttgatgcgtttccgccagtctaatttgaggaattcgcttaatagagaaatagcggccgggtttaggctgttacatcgttagttaggggcccacatcgtcgagggaaaagtaacatactccttgaagactccgtggaggttcccacgtttgtaggcgaagtttttcacaccctcacaacccgggagttgactccatccgggcatattctcctcggtgggagtgcccacaagattgaatatcagttctgcttggttaagatcgctgtttccagcaaggatgggcttgcccttgaacatctcgccaaagacacatctatagaatattagaaaatgataagcctggctaatagggatggaaagcttacccaactccccacaagtcgatagcagtagtgtatttccgcagctgtagcagcaactccggaggacggtaccatctcgtgacaacaagtgcagtgtattctcttttggaatctccacctccttttccgggtaatggaggggcatcatcgtagggccgagcaagaccaaaatcagcgatttggagaattcctccattgctaattagcaggttcgccgctatttattctgttagctcggaatcatggtatatcagcattcaacacccacctttcatatcacgatgtaggatgcggttctgtgaaattgttagacaaatattgcaaggaaacgtgtttcaagatgatcgtactgcgtgcatgaacttgagcccttcgaggagttgcatcaagtagcatttgatctgtggttcggtgaattgaactgccgggttttccaggagcccagacaggtcatgttccatgtatggaaataccatgtacatgctcggctttttccgcccttcgcctttgcctcgctcgattgacatctccttgagctgcaaaatgtttgggtggcagagtgccttcatgagtttgatctctcggatggcggtaatagggaactagcccaaatgtcaatatatagctaataaagaacaaagagcttgtgaacttacgccttctttctcgtgatgcatgaggatctttttcaaggccacaattttggtgtccttcttagaccttgctttgtagacctctctattaaccggtcagacggtttcttgcagttataacgctgccgaactcacccgaatgttccttctccaagcttgtcaaggaattcataatcacggatgtgcgaacaaccagggaaacgggcctggccattctcgtacttttccagagatttaatctccatgctgactcgtcgcttgagctggtcgcccaccccggtgggggaagaaagagctatctgatgcttgtgtcaaaattatcgaccgtcgtcaagctctgcggtatgctttggtttgatgttgtgttcaggtacacggaggagggttcgagaagtcttcggcgacagatgattgtgggaaaagtgtcaagatgaatcagcggggaccttgtcggagagagccacgcgcgtcgagtgtgttataagacaagtccatatcatagtacaaagcatgtgtgacgagttcgcattgttcaaagcccgcgcgtggggagctcggccacgcaggaggctcaatataaacctgagtaggaaccagcccagtcaaggtataggcgaaataggagtcagacgactcttcaataacgatatagattattgttctgctgcttgtccttgcgaacaacccaaacactgcgctgcggtggaattcgagtgccgtcacgggtcacgtgctaccaacctctccgttccccgttgaaccgcagaaccctctgtcttcagatccgattcgagattggcgttctgtgaacaaacaacagccatttccagcacacagtacgtcttgcatgcacctttctctgttcatgtgaatctgtggaaactaatttctttccaatctacacagtcatggcgggcaactcctcccaccctatccacatccacccggtccgaccgctctaccgcttcactgcgactgcattgggcgcgagcatgtggttcttcgtaaggatcgcctccttttgacatggagacctcgtactgacaggacttctgcgcagctcatgtaccgggccaagaaggatggtcccgctctgttgggctggaagcacccttgggaccactgatccgaatataatcgtcgatttcatttttattgcgcaaccgcttttgtccctcggggcagcggtgatagttgggtcgcattgcgtactgtgtacttggactaggtagagaggaacagcgagccgggtgttaccgagcgcatgtcaaagccacaagttcacgatagctatttaccagccgaattgtatcataccctttcttttcaattttctgaaatggtaaactatggcctgagtgattgggacggagcctcattagatagatgactagatccagattatgacaatctaaatgtctatagttatgtacaagaatagtcggccgcatttgcggcctatgtcattgaaaaagtcatgatccagttgacccgacggtggtctttcttagtctttcaagaagctattttgtatggatatcccctccccttcctagttttgtgggtagacggcagaaaaggacgggaaacgacctccctatgtaaaacctttggtttgatagcgtacaacgtgaatgcgttgataacgtacttcataggcgcagtccctccaacagcactttgtacatcttgcgcttcttgcggtagttttgctgcaagcgggcacgagtatgtccaagtatctgtgccacgcgagggaatatggtcttctctgctgtccaggacaaaacgaagattccgaatgctagcgcaagtagccaggacttgaaaccatcagacatgaaagtcagttgcatcacctccgacacccagttagatggtctaaagagcatatagcccgagaccaagatgttgacgatgatcgtacataagtacggcactaaacgatcatagtcagtatctagatgagcaagaaggggaagttagtggtgtgcttcttaccattctgagtcattggtttccggaatggcggacccgcactcagaacaatgctgatgaagatgtactggaaacaggaaaacaagaacaaagaagtattctctgaattgagaatgttgctcttttctttgtccaattgtggcggcaagaacctgcattgtttgttagaataattttaatgggtatattgtaacggttactgaccatggctgtaattgaacggtctggaaaactgcaaattgcgacagcacaactagcaagatctgcccgagcaaaggtgtcaataccttacgggaaacaagatcagcagttggccgtttccgagacatcgtgggagcaggatcagcccagcccactagaatgaaattagctcgaggactcagattttaggagagagaccactcactgaagaccgcaatgggcataatgagcagaagatcgataaagaggaacttgaggccattagcgatatatcaaaactgttggtaataagcccacttacctggaaatcaccaagatttgaccccgacgtgtacaggaagctgaccgaggagaattgaatggcggaataaagactcatgaacttgaaacaggagaaacttgtcaccagcgcagctcgaccttccctgatcaccgtcggaacacaagagatttcgaacacgcggctagtaaagggtgcggcaacggacgcctcggcgtccgacagtgaaataccaacatctgcggccttcagagcgccacaatcattggcaccatcaccgcaaaagccacagcagtaatcaatagactgaagtttctcaactagttcgtgcttctcgtccggggacatacgggcaaacactttgccgcatacaagtacctatacagtacacattagttcgacgcatggtaaaaaatggtaatggttagtacaacggctgcttaccttgttgagtacatcttcattcccgaagtcaaccaaccatctaaaggcatcacccgtgacagcaacagagtattcacgctcggtgaaaacgtttcctggaattgacatgtcgacctccgcgtcgttgagtggctgcaattccattagctgctaataattggatatagggaaaatatatcttaccaagagtgttcttgggtccaagcggaggtcggagttgtccacgcattcccatatgagagaagctttaggtgcaagaccaggcgctggagatcgttaatactgagctatggcatggattcggtaaacaaaccttcgataaagtgcgggataaagcatagctcatcacgtccaagcatgttgcattcacgagcaacactgatggcagtcaagatgttatcaccggtgcacattacattgcgaatccccgcctcgttcaactcggaaatcacaccggcagtactgggcttcaacttattctcgaatatgatgaagcccaagaattccaggtcagattcggcttccgtccgagacattttttggacttttctccagctcaattttggttcatatttggaagcacaggcaatcacacggtatcccttgtgagtgtagtaattcaggagatcttcataatccgaaggaactgcaaaagaagtatatcagcaatgcaagcttatatagagagcgtagaaagcactgacgagttccaggaatacatatgtccataatgctttctggagcacccttgacaaagaaacttgctccgttgtcgccaaatttcctgacaacgacacttgcgcggcgaagattggagacaaattcgaaactccgcagaactccaagctcgagtgggttctgaatattgttagccatcaagttgtggcttgaatataaatcaactcacatttacatcaccattagtctgtccttgaggaggctttgcaactgacggcgctatagtgtcatatttggggcttgtctggtcagaaatatgatcccctccctcctcaaacgtccagttggtaaattgaaacatcttgacatcgagaggatctcccaacagctcattgtccactaccctaagggaatgacacgtagccatggcgtacatgatcttcctttgctttttgatatcgtattcggagttagcatcgggggaaggacgaagaaacccgtcattcgtctcagagagcaagtctgaaaatctagagattcatcttcagcgccggcttaagggtcatacttaggaacagacaaacctattggcacgggtgactatacgcattcctaggacatccagtccgtcttctgtgagggttcctgttttatcaaaacaaacaatgtccagctttcctcccacgttgaccctgttctcacgtattagcgtcgaagttaagacattattcatcggaggtcactcacttctgtgggctgatacagaatatgttctgtttcttcagtcgtgaaagtgcaaaattggttccgatggtgagtgtggctgggagagctggcggtacaacaatcgtgatcagatcgagggctcgaattatgatcagatgccaagcgagctatatttcgttgcatcagcggccaacataaccttaggaaaatcgtcgttccgagcattaacttacacccaatcgaacaaagttaatgaatgaagcaacgaatccgatgagagcgacaatccccatcacggcgatgtagcggaacgagtctcggtagaacttgaatccagagggtttcggaaaaagcatcgatcgaactagagcccccttggttgtcgaaaagccagttctcatgacaattgccaatgctactgcttcatcgtcatcaacattctggggtcgtctagcccggattactttggttccgctgaagaggaagtgtttagcaacatgggggtggatagaaggggtactgagatcgagatattggatggcgtcatcggtgagtggtgttttagacacagggacggattcacctggtcaagttagatgtatgcatcaatactgagggtttttacgaaccagtgagcatgctctcattcacaatgcagtcacctgacaacaagatacagtcacacgggacctggtgaagcgatgggtcggaaaattcataaacatcaccaggaactagttcttgggaggaaacggaccgccctgtatatacaatcagtttacattcggtgagatgatgcatcgaacaaactcacagaatccacttcttagaacgcgaacatcacactcgaaaagagatatctccctgagccgactcatagtctatagtagcgttagtttcagataatggtcccattcttgggctgaacgcactgatttcgtctctagcacagtcgttgctatgctgaaaaacgatataagaaagatacagacggcgtagtagtagtactcatccatggaccacagaacgagacttgcaatctggaagatataaaaaggatgaaatgcctatacactgtcagatatattgatggaacaactagaaggaaaactgacctcgtcgacgagaagctgaggaattgtctttgcatcaatttcgatgtcgttacttccgaatatctgttccctgctgtctcgttcatcggcatctaatccacttcgcatgactttggcattagtccacgaaggatctttccagccgcttatcaagcaaaatttatcctcgattggatgatagaagaacttcagatatcgatagtcgatgaagtgcagagaggtaatagtcgggtcattatcttcatcgtaggtgtgattcagtgagtcggcgaagaccgtggaaagcggacgtccataaggctggctgccaactttgtggatggtgaattggttccattggtcctaccatgataccatggtcagatggttaatgtatgggattgaagttcacaatcttacctcaatagccacccattggcattttcctaatggggttgccttcccaactaactttacccgccatcgtggcagccatcggaagagaagccaggcaaatccaccggtcaagatgcaaagggcaatatagacagcaaaccctcctgaactcgtggagaacccagcaaagacagccgtcaaatcttccgaggcgagatagactttttgattcaaccgactgccggatcgtcggtctcggccatatgagctggcggacaggtagcgagaaagaagtggatgttcaaccgagtcgcgggaggtagacatccgcttagacacaaaggatcccctgactgactcaacatctgcatccccaatgccgtgtaaagattcttcatcaagctcgctttgctcgtccactgcagattcgttcgacaattctgcgaagtcttccccgtcctggaagtatgtaaagctcaccgtagagcctgctcggttacggcggtgcgcgaacgaggcgacgcttgaagggatgctttccgagatcgggccatcgaagacctagtgcgagtcagatcctgcgctgaagtctgcacgtgagaatggagatttgacatacctcattacgggccatctccacatccgacacggcgctcacactagagaagtatcagcagggattgaagggttgatttgggtaggaagggagcatagcaacctgcttcgcatggaatcgcgtcgcattctgtttcgaggcatagataggtccacaggaccagtccccgagggagagtgcggacggggcatgtttaagaggtcaactcggccgattcacaaagccaatagccttgcagagtgtcgtattatggggctttcgtaaagtcgtatttcaccgacactggaccgaaggaaaacatttatcgtagagcgcgagttcgcacaaaagcagggtgtgatctggagcttatcggcgtcccacagcggagagcgacttatctccatgtgactgtccgatagctttggcttactaattatatcggaccaaactttgaaatcccccatgcagggcatccatataaagttgtatacgataacggcttctatatgccattgtgtatattgacaaggttcgataacaatctagaagaacggatgagtcttggcatcttatgtctggactttaacggacatctcattggccactgaatcatcgacggggttttgatctggaatgatacaggaggatctacatagccctgctcaaggctccgaagtatttcaatccttgtgtatttacccaaatgacaaaaagtacctttgtacatcatcctacgcgagtcttgaacgtcatcgaatttcatgtagcctaggcaaaacaagcaacttgtccacgggtgtaaaatacccgtttctataaatatatatcgcctattcatgggggcgaatctcgtcctagacctattttcttaccaagcaatccaaaaaaaccacatatagcaggcgaatgggccaagaatcacagtcagatagaaataattcccagttccatagccatatttggaattggagagaggggtaatggtccaggacgccaccgggagcgatcagatcgaagatgatcacagaagacaagatatcaagactccttgacatggaaacgacaagatagaaggaataagaaagataaaataaagctgtgtccagcgtaacaaggcgcgacaaatcaaaagcgtatcaaaaaggtattgttgggagaatttgcagtctttgcaggctcaaccagaaccgtcccgccaagcccctcggccacagggcgctaaggatcccaccatcttccagactctcttcccccaaaactgaacgggtatcaaattcttccttctttctctctcctcacctcattccctctccctgccccttttcattccccgttcatcatgtctgagcccatcagaaataagaaggcggacttcccggtcgcaccgtaagcatcccccctcctcccgtttttttttcccacccttatcaaaagcaaaaaaaaaaaacatggatgctgacttgcagaaggaccccgcaaaacacgccggccaacaatgctcctatctcatctcacgcccagcagcctggtgtatccagcatcgaggagggtaagtcatctcttttctcgtattcaccgacatttctttgaccgtgctttctgttctagaaacctttgacaaagctacggctgcctcgctctttgctcgcaaccctgctttggtatccatgatccaaggcaagttgggtcaactcgtcggccgctcgtcaggctacatcgaatctctccccccctccgtccgccgccgtgtcgctggattgaagggtatccagaaggagcactccaagctcgaggcccagttccaagaggaggttctggaacttgagaagaagtacttcggcaagttcacgcccctgtaccagcgtcgttctactattatcaacggcggcatcgagccgaccgaggccgaggttgaggccggaaaggaggacgaggagagtgatgaggaggagactaaggaggagcccaagaaggaggagggcgaggccgcgaagggcatccccgaattctggctttctgccatgaagaaccaaatctcgctggctgagatgatcaccgagcgcgatgaggaggctctcaagcacctcaccgacattcgcatggagtaccttgaccgacccggattccgcctcattttcgagttctctgagaacgagttcttcaccaacaaaactatctccaagtcatacttctacaaggatgagagtggatacggtggcgatttcatttacgaccacgccgatggatcccagattgactggaaggaggaccaagacctgaccctccgcctggagagcaagaagcagcgcaacaagagtaagtccactcgaatattgagatgccatgttgaaactgacagctgacgctcctttagacaccaagcagacccgcgttgttaagatcagtgtgcctaccgagtccttcttcaacttcttctcacccccacagccacctgccgaggatgacgattcagtcgccagcgacattgaagagcgtctggagcttgattatcagctcggtgaggatattaaggagaagctcattccccgtgccattgactggttcaccggtgaagctctccagttcgaggagctcggtgaggatctggagggtgatgagtttgaggatgacgatgacgaggatgaggatgaagatgaggacgaggaggagctcgggtcagaccgtgaagtggacgaggaggacacagacgaagaggtatggcataccacactcaccgactcagatcacttgctaacttcgttccaggatggtacttccaagcccaagaaggaggccgccgagtgcaagcaaaactaaaccaaaaaaaagttgccggtggagaatgcccaacgtgagattactcgtactctctgatattttgctttgctttctgcctttttgtgcccccctgcgttgacctctctatcttctaatactcaatcaatacttgacataatcggtgtgtaattctcagttccggcgctgtaaggatttggacccatagctgagacccctggactgtcttataaaaggatagtctacgggtatgtggctattctggtatgtatgtatacttgatatccaataatcaggaggcaataccagagacgatacctacatgtaggtattaaacaagcctcaggtacaatacgactttctccttcataagtaatagtagcataactacggagtacatgtagtaaataggagtataatgtacatactagtacgtaaacataaggtacagtgtagaccaagtaggatggcggtgacaggctgtggggtgtgccgcccccccagtatattccctaagctccttcaggggctctcgctaaatggccagctgttagtctcactcaagggttttctttttcacctccatctaattcttatctccaatctttttattctattcttttgaaatatgagatgaggggttgagaaatccccctgtctttggactacctgtatcgccttgaaccttcgatgccctacctccgaaaacacccatcatccccggagcttctgcaaatatcccgcttttattgcatcaaaaacgattaacgacctacattccatatggcgcacacctatgaggtcggcacgcgggcctggcagcccgacccgacagaaggatggctggcatccgaggtgaaggagaagctggaggatggagagaaagtgcagctaatctttgagttggaaaacggagaggtaggtgcccttggaatactggacgcgggctgcgcagtcctgtctcttgagttttccggggttgctgacactgtcttgatcggggcagacaaaaacgttggagaccacgcaggccgagctgaagatcgataacaaccccaaactacctccgctcatgaaccctgctatgcttgaagcaagcgaagatctgacgaatttgtctcacctgaacgagcccgctggttagtcttgctcctacgtgtccagtgccaccctcattgctgacggccctttgaagtcctccaggctataaaactccgctatgctcagaaggagatatatacctacagtggtatcgttttgatcgcaaccaacccctttgcccgagtcgattcgttgtacgtgccgcagatggtgcaggtttatgctgggaaacaacgtgcctcgcaggcgcctcacctgttcgcgattgcggaggaagctttctcgtaagaatcgtccagctgttacatctctgaacttgatttcgcttacacttttgatacagtgacatgcttcgcgatggaaagaatcagacgattgtggtttctggtgaatccggagcgggtaagaccgtgagtgccaaatatatcatgcgctactttgcgactcgcgagtctcccgatcagcctggaaaatataccagcagccgcgcagatgcaatcagtgaaaccgaagagcagatcctagctactaacccggtcatggaagcgttcggtaacgccaaaaccactcgtaacgacaactcctcccgtttcggcaaatatatcgagatcatgttcgatgaccgaacgaacatcatcggagctaagatccggacctatcttcttgagcggtcaagactcgtcttccagcctctcaaagagcgcaattaccacatcttctaccagctggtagcgggtgcttctgacgcggagaaacaggatctgggtctcctggctgctgaagactttgagtatctcaaccaaggtggtactccagtaatcgacggtgttgatgacaaggccgaattcgaagcgactaggaagtcgctggctgtgattggtgtgccgcaggaagaccagacaggcatcttccgcgttctcgctgctttgctacacctcggcaatgtcaagatcacagctactcgcacggattcgtcagtttcgtcgaccgagcctgcacttatccgcgcgtgtgagatgcttggaatcgatgctacggagtttgcgaagtggatcgtgaagaagcaacttatcacgcgtggtgagaaaatcacctccaacttgacacaacaacaggccttggttgtccgagactccgtcgccaagtttatctattccagtctatttgattggctagtggagaagatcaaccgccgcctcgctactgatgaagtgcttgagcagttcaaatgcttcattggtgttcttgatatttacgggttcgaacatttcgccaagaactctttcgaacaattttgcatcaattatgccaacgagaagttgcaacaagaattcaaccagcatgtgttcaagcttgagcaggaagaatatgtccgagaagagatcgattggacattcattgacttttcggataaccaaccttgtatcgatcttattgaagcgaagctcggtgtcttggccctattggatgaagagtctcgacttcccatgggctcggatgagcagtttgtcatgaagcttcaccatcactttgccgctgacaagcaaaagttctacaagaaacctcgcttcgggaaatctgcattcaccgtctgtcactatgcagtcgatgttacttatgaatctgatggatttatcgagaagaaccgtgacactgtgccagacgagcatttggaagtgttgcgcaattcttccaatcctttcattaaggagattctagaaactgctgcggccgttcgtgagaaggactctgctgctatgtcatctaagccagttgcagcagctccagggcgtcggattggcgttgcggtcaatcgcaaacctacgcttggaggaatcttcaagtcttcgctgattgaattgatgcacaccatcaacaacacagaagttcattacatccgttgcatcaaacccaatgaggcaaaggaatcttggaaattcgaaggtcctatggttctcagtcagctgagagcttgtggtgtcctggaaactgtcagaatcagtactgctggctacccgacacgatggacttatgaggaatttgcggtccgttactacatgttgtgctattcctcgcaatggacctcggagattcgggatatgtgtcatgcaatccttcgaaaggccctgggagatgagaagcaagataagtatcaacttggtcttactaaaatcttcttccgagctggtatgcttgcattcctggagaacctccgaacgtccaggttgaacgaatgcgccattatgattcagaagaacttgcgtgccaagtattaccgccgccgctacctcgatgctcgtgactcaattctcaccactcaggccttcattcgaggtttcttggcacggcagcaggcccatgagattcgccggaccaaggctgctactaccatccagcgggtctggcgtggccagaaggagaagaagcggtacaatcaaatccgcaaaaacttcattctcttcgagtctattgccaagggattcctgtgccgacgcaacatcatggactctattaatggaaatgcggctaaggtcattcagcgtgctttccgctcctgggttcaaattcgagcctggagacagtatcgccgccatgttatcattatccaaaacctctggagaggaaaacaggcaagaaactcctacaagagacttcgcgaggatgcccgtgatcttaagcagatttcttacaagttggagaataaggtggttgagttgacccagtacttgcaatctcttaagcttgaaaataaaaccttggtttcacagctggaaaactacgatgcccaattgaagtcatggagaacccgacacaatgccttagatgctcgcacgaaggagctccaggttgaagcaaaccaggctggtatcaccgcggcccggttagaggcgattgaagaggagatgaaaaagcttcaacaaagccacactgaggctctggctaccatcaagcgcctccaagaagaggagaggatatcccgtgacgctcttacagtcgctgatggcgagttggggcgcctcaggctattggattctgaccatgagaaggataagactggtctccggcagcggatttccgatcttgaggaacagctcgagactgcgaagagatctgtgcctttgcacggcatgaacggcgatggtctatccaacggtggcgcagtcttgagcactgccccgggcttgatcaacctggtatcttcaaagaaacctaagcccaagagacgcagtgtcggtgccgagaggatcgagacggatcgcttcagtggtgcatacaaccctcggcctgtttcgatggcggtcacccctggatctatgatgtcccgtcaaaatgcagccatctctcctggtctagagtcggtcgagatggaactcgagaacctactttccgaagaggaagaattgaacgaggaagtcgccatgggtcttatccgcaacctgaagattccgctcccaacttcgacaccgcctccaactgaaaaggaagtcttgttcccagcatacttgattaaccttgttacgtcggagatgtggaacaacggatttgttaaggagtcggagcgattcttggccaacgttatgcagtctatccagcatgaagttatgcagcatgatggggacgacgcgatcaaccccggtgccttctggttatccaacgtgcacgaaatgctatcatttgtcttcctggccgaggattggtatgaagcacagaagaccgagaactacgagtatgaccgcctgttggagattgtcaagcatgaccttgagagcttggaattcaacatctatcacacttggatgaaggtcttgaagaaaaagctgtacaagatgatcgttccagccatcatcgagtctcaatcacttcccggctttgtcaccagtgaaacgaatcgtttccttgggaagcttctgccctccaacaataacccagcctacagcatggacaacctcctcagtctattgaacggtgtttacaaggcaatgaaggccttctaccttgaggacgccatcgtccttcagaccgtcacggagctcttgcgcttagttggtgtcactgctttcaacgatctcctcatgcgacgtaacttcctgtcatggaagcgtggtctgcaaatcaactacaacatcactcgtattgaggagtggtgtaagagtcatgatatgccggaggggacgttgaaactggagcatttgatggtaagatttcttgtttgatatttatttgggtattatactaacacctacatagcaagcgaccaagcttctgcagttgaagaaggctactctgaatgatattgagatcattcaagacatttgctggatgtaagtggacccaagtatcatctcccacgaattcacatgactaattttgtgcaggctgtctccaaaccaaatccagaaacttttgaaccagtacctggtggcagattacgaacagcccatcaacggcgagatcatgaaggccgtcgcttctcgcgtcacagagaagagcgatgtgctcctcctggctccggtagacatggaggacagtggcccgtacgagatcgccgagccgcgtgttatcactgccctggagacttatactccatcctggctacaaacaccgcggttgaaacgacttgctgagattgtgtccgcgcaagcgatggcacagcaagagaagctcgaatgggaccatgggatggttgaggaatagatctgtactgttgtatattagacttatggatttcctgtgagctacggattacgacttgcctggattatccatggcctttgcgatacagtgttgcgcgtgattttcgtttgtttcaattgcatatgacatcttggcttatagaccagaagaggttgctaagagaattcctgtaatgagttttctccttctaaaacatagacgacaatccaaatacaaaaaatggaatgcccgaagggtttattgtcccgagtagagcaattgatatgtaagttttttttattttttttatttcatgaattttgaacatatactatggattagttctcaccccctatcgtcggagtgctacaatgactaccccaagatggagaaaaagaaaataagaaacgaaaccaaagaaaggaaccttaagagatatatatctgagtagtccttagatcgggtcaggtgatcccaacatgtatgaatcccagcaccgtcaatatatgcaatcagcgatagcacagtggggcacactattatctgcgacttgcaacatccaacccataccatcacctaccaatctaaaatccatacacagtcaaaatggccatcaccacgctgaacttcatcaccggcaacaaaaacaagctcgccgaggtgcaggctatcctcggtaaggtcatcgaggtgaacaaccaggaggtcgatgtccccgagatccaaggcacaatcgaagaaatcgccaaagagaaggccagacgcgccgccgaagtggtaatttcttcctagacttttcatgctgaaattgcatttgcttacgagggaatagatcaatggacctgccttgaccgaagacactgccctggagttccatgcgctcaagggtcttcctgggccatacatgtatgtcttagctatattaaggcttacttactatgtgataatagtactgatgattgccagcaaatctttcatggagaatctgggccacgagggcttgaacaagatgctcgacggcttcgaggacagaactgccgaagctgtgtgtacctttgccttttgccagggccctggcgcagagccgattattttccagggaaggactgaggtgaggcaaatacagtcatttcaaatttgaatatatctaattgtgattgatgtacagggtactattgtgcggcccagaggcccagcaaaattcggtaagtgaacatccaactgaggtctgcagagaatcaaaatcaagatctgatatatgacaggctgggatgctatcttcgaatataatggcaagacatatgccgagatggacaaagacgaaaaggtaagaacggtcttgttttcccgtgaaaaaaagccatgtactaagagccctgcgaacagaacaaggtctcgcaccggtacaaggcgctggtgaagttgcagcactggctagccgaccaacagtaaatgggtatagaactcggcctgcagaagaccatagaagaatgtgaaacgaagatcaagaattgtatatggcctggcgcattccctcaatccgcattctgcgcatgcgattgcttccacgaatcgacccattgcgcgatccgctggcagttcgagtctacgtctgcatcctgctcgctgttcaactcgaccacgatctcttcgtcgaatgcctcccgcgcttcgtctgataggacgccgaagatttccgcgtcgacgttctcttctagctttttctcatggtagccccttggaataggttagtttgacggcgtagatatgttgcgaggttgattgtcataccgggaggaaagtcggtcgtaaagaacatctgtagtggggcagcggaggacaaccacgagatcgatccaggacttagggaagaggtcacaggcatgccagtcgatcaagtaaccgccatcaggaatctcatcttcgagggcatcgaggagctacatcgcgcatggattagcatgtgaattgttgagtcttgaaccaatggtgggaagaggagctttcagtttaagagaagagcttgtaggaaccattctcaccttatcctcgtcaacaacccaggtcttcaattcctcgtcgtattcatcgaagcatccacggtcctttgcgacctgattaatggataggtgcttcaagccgatctcttgcgcgagttgttcgcagtggacggtcttccccacgccgggggtgccggtgatgatcacatttggagaggtgcgcatagtttcttaaaggatagagatcttgaagtggaattgtagattgtagattgaaaatggtttccccagatgaaataattccatcggactaattttcctcccggctatcttatcgtggaggggtaaggtactgcatttggaatgtataaaagacatttatagaaacttgtaactatgtgttctttatttgactaacacgatacaaatgatatgcattgttaatggaatcgtttgattttatgcggcttcatgttccgggctggttgtacatagcctagtaccaattagcattagaacgatgagaattgaacaatcactcacttgagaagctcgaatatcttgtacttttgcagataaggcgttcctctgcgatatgctttaagtagacgagttggatctgagggcttgacaaacgtcccgagcaagcgctgcattgcaggagaagtcttgaacatgggatcgaataccagcagatttgcgctgccgttgtctcggatttcaaaacctacaattgtcatagaatgacctagctcaagttagattgaggtatataggtttgaaagttacagaaagttgtaccttgatgctggaagtatatcggagggagatcagtctgaacgatcttcgcatcgtcgtctggtgagcacgctgatcggaaatattcggcgacatcaatgtaaagagcctcataggcccgaacgttgcctgattctgacagactccgggcttcacatctagatatagggtcagcgggatcgaatcgaagcaggctagataactcacgggattcctagactcatgaaaagcgcttgtgcctaggtactcgttaggtatagcagataatcaatacggagaaaagacctacttcaggcgtaccaataaacttgcgcgtatttttgataccccctgtctcagctcttccagagctattgaaccccatatcccaggccgactcaatcatatcctgcaactcaaggatcgttggtcccttatttggaaagtgctcatagccaaagctacgagacttctgcagccaagaaaccagcatttgaatattgcgatagccacaaaacccgccttcccgacgcatcttgcagatatggcggactttggggctacagaataatgcccgctggacagatttgtcctgttcacacagccgagcaagaacaggaattaagttgtcggtctcattttctactgtctcgcgccgtgtgagtttgccatcggacgtgatttgggtttgctttgatgtgctgccgcccttctccagcattttccttagccatgagggcattttcttctcgtgggcatgcggacccaattccgagcgctggatagtgttagtacttatcttcagagatgcaaatctgggacgaatacccctaatctcttcgtcccgttggcattggttgcccttgggggactgtgaggccgtggtgtcttggcagtgtttactcgcgaggagtctcgttgcatcccacgcttgcctcctttgtgggagttcagcatgtcgagtgaatcttcatcatcaaagtacccatcgccatgtacgtctgtagttgggcgtgccggtgtgcccccagtatcatccatgccctccgcaacatgcagatccaggtgactggagagctcggcaatttctattgtctcgccacatccatgtggacagtcgacatatttgtctgcgccaccctggctcactggcagtgaagctgagttttggccagcaagatcctgcgggttatcctgtatggaactagctagccctgtttctggatggcagtattcgatgtgttgggacacaaaattagcatcggagtctgcgaaagtgcaaaaggggcatgaggcggtgttgttgtcggccatggaattttcgtccagtgctgacattggaggggaaattgttaggttgatgctgcagacaccaagatgagtagcaggtgtatatgtacaaaacgcagagagagaaaaagaatgccaaagttgattacacgaagagccagaagtatagacaaaggatttaatttgatgcctaaatggccagacagcccgttcgccgagacccactaggcggagttgtcagttcatgcggcgtacacatgcgcaacacacaacatacaacatacaatctggattatctttcattccatatattaatgaaccttggaagagatatcattattggtctcttgcttgtcctctttctgatccggttttcttcccagccctagccgaactggtccagctcgcctttgagaagtgcttcccttcatgacagccgtgggcattgaacttctttggcctttttctggcctcttttcataggagccatgtggtcatgaatatctgggattgacagatttcccatcattccacgatgccaaggaaggcgaacactctagagaccagactataaagtctctctctgcaagatattcagtcttcttttcgggcgacgaccaatggggctgctggagcctccggatggcacgaggaatcgtgaattgctcagggattctattctggaaggtgagaatccgaaattctccagtcacctacaggctccgcggtctcaaactcttcagcttggccattagcgcctctcgcttgctgttaaactgcccggagcgcagatttcctcaagctggaattccaacaaactgagtgcgtagctcaagctcctggatttgaatatggacctttggccacttggtgcacgtggcctccttcctatagtggccatgaggtatcgactagatctgagcaatatgctgatagctattctcaatgtagggaaagagattaagaaatcttactctccgcgtggctctctgggttcaaataaccagaatctgcccccaaggtagatgaagtaaataatcggaaaaaacggcaacgatctttgacaaatcgtgaatcatctaggtatggggctactttggctcttctctccataagatgtatggcaatgtccatacagatagctattgcggctattttctgtgactataaaattgtatacaggaggatcaacatgcccactcgatgtttctggcatgttccgaaaagtcgcaatcatttctatcgtgacgtgacggcttgggtcaccgcgcagcagaatcatcataatatcaacaaggacaactgaatctcaagcatggtccattcaagtatatcactgtactagtactagaaatcaattgtcgagtcctgatatatactccggaagaacattcaccccgccaagacccaatgaggtacatttcatatgaaaatggcgtgattggtggggcctccgacatcgttggttcctggccgcaacaggcaggcggtctctctctgcataactctatttccaattgagtcacaaaaaaaaaaatatgcaacccgaagtggctcctagggtctccgctttcgccggttccccctccaaaaccacttctcactcccttgcattacattgtacactgtctttacttattttgggtcgacactatggataccaccattcttaattcgaatttgccagtgaacacgcaggcccatagcaattgggtcgtgcagaaattcggcggcacgagtgtcggcaagtttgcgcgcaatatcattgagcaggtggtacagtatgacgcactttttcgatttcgacttgacggagactgacaattgtatagaccgagtctcgtgaacaacagagtcgccgtcgtatgttccgcgagaagcagttccacaaaagccgaaggcacaaccaaccggtgagtcactactccgcagccatatgacgcttgaggtattgagatactaacaccaatttcttccaaccaggctattgcgggcagcgcgggacgctgaaaatcctcgttcaaggcaatatctgacattggtggaggctgttcgtttggaacatgtacaagtcgcccaggaacaattgaaatcggtagaaataagggatcaagtgattgcggatattaccggagaatgcgaacgagtactcaagttcctggaggccgctcaaaccctgggagaaatcagtgcgcgctgtgtggacaaggtgatgagtaccggcgagaagctgagctgtctgctcatggccgcccaattacaagaccgcggggttgattcgcagtatgtggatcttgcagaagtcattgatttccccatcggtccccacggcttggaccaggacttttataataccctggcggcagctttcggcagcaaagtcgcggcctgcgggcatcgagtacctgtgatgactgggtactttggtaccatccccggtggtctgctcgatcagattggtcgtggatataccgatctctgtgccgcccttgtcgcggtcggaactcgcgcccaagagctgcaggtctggaaggaggtagatggtatctttaccgcggacccgcgtaaagtgccaacggctcatctgctcccgaccattacccccgccgaagccgccgaattgacgttttatggatccgaagttattcatccgttcaccatggagcaagtcattcgcgcacggatccctattcgcattaaaaacgtcatgaacccaaagaacgcaggcactattattttccccgactctgtggccgaactagagagaaccacacccggacatgatccacgtttgttccggacccggagtccaactctcgcgcatacaccgaaacgtccgaccgcagtcacaatcaagcatgatatcctggtgatcaacgtacattccaacaagcggtcgctctcgcatggtttctttgccggcattttctccgtattggacaagtggcgcctatccattgatttgatctcgaccagcgaggttcacgtgtccttggcccttcactcagagttgccccttttgaatggaaacggacgggatgagtatcagatcatcgacgaggatctccagggtgcattgaacgacctggagaagtacggaactgtggatatcatccccgagatggccattctcagtctggtaggcaagcaaatgaagaatatgattggggtcgcaggccgtatgttcaccactctcggggataacagcgtgaatatcgagatgatttcgcaaggtgagtaaataatgatccccactcccccgcccccctcgctctgcctttgtacccttgactggggctaactggatcttttctccccctcgcaggtgcaagtgaaatcaatatctcctgcgtcattgaagaacgagacgccgaccgcgccctgaatatcatccatacgagcatgttcaccttcctggactaagcgtcccacgtttgcgcatcgagcaaaaagtcattgttttaagatatcccttgggttttattgatagaaaaaagttatgcatccacccgaagtcgaagttccccgtgaatataggaggacacgacttttgttgggaaaaccaagcatgggctttctttttttgtgatgcatgggcttggagttttctgctttcattttccccggttctttttttttcgtctagaatagaagtcatgaagcgattgttccatgagggatgattttctctatattttgggatattcaatcacacacatcttatatatcagatttcttcttcttggtccctttccactgtagcctcctcctttctgcgccctgaatagaacggagtacaacgtactctgtaccccctgatccgacagtgaaaggaccatcggtgatgattctagctggagccaggcgtttaatgtgtctctgtcgcttcgcttgagtcggagtctgttagctctagggttactgtcgggttgtccacgaagccctgtcgcactggctaacctctttagttttacatctccttccttgtcacaacccttttcttccctgacagctcctgggtatttgtagcggggtggatacgacctatttggttaaaagcgaggtccattgagtccctgaattctccaatggcttggaatggacgagtgttagcatcatggcgaaagatccgaggaccctcataagaaggcaaacaggagagcctgggtaaagggattatggttcgtccagcaacccagtacagagtgagtaagtgcatgaaatctgttacaaggtgtctctgatatacaagcaagggcatagggaaatacactagggacctcctagattcgaacaatagaccccgttctagttccaattcattgctctgtcctcgtactccatactctgtgtaggtttggattattaggttccggcacctgcagacaagagtgcagcacatgcgttgtacgatgcagcctggaagattgattggccctcgacgcacccgagagcaattggccactagtcaagggcgttaggagatccatgacagcagataaacaaggggtgaaaggtagcgagcgtttcagagttacatcaacacttccacataccgggaggcccggaccaattggggtgccaatgctggattgacagtgtctcggtctagattggtggtgtgatactacgtgtacttgtagggctagatgtatgccggagtacggagtacactccgtatattctgtatattgtagacagcgtattgacaagagctaaagatagatatactgtacactatatgcttccaatatactactatacaacatatactattcaataatccaagcaataatgcaaacctgacatacttccgttcatcctcggtggatcagatcggcgctagaaaatgtgagcaagggaggggaccccctttggtaagatatgaattgataatacgaatgataccatcccgatatgccccacctcccatagtaaaacgcgtgacgcgtcgagataatgacaatacgtgactggtatcatcgcactatcgcactccatgatctccctctcctcctcctcccccccgcctttcttcttcgctgaaggaaaaattgaacatttctagaattctataataatgatttagtatcttccaagggtgaacaaggaaactgagagaaattctgaacgatatctcttacttgtcacagaaccccattctttcctctcaaggaaacccggcttactcttccaagtcttactctactcatttttcctgtacttccctgtattcttctcttctctatcctctctatcctctatcctcagcgtcagcagtccgtaccatatctggatattggttatctcatctcaaatcacacatctcatccattttcatcggttatcagtggcttgattcgtgccccggaagtgtgacgccttagcgccttgtggcccaacttgtttaagctgcatgacggcctgaggttattggcttcctcgatctacggagtaccattggtccaattggaattctctgcacagtctcgtcacacctagacacggctcgctcgttgtcgcaaactgggccgggggccttgttttcaacagtcgcgctctcccccaactctgtttacgcgtcatatggtccctctggtgattggtgatattgcaacttggtgccctatcatttaggttatgggatcgacgcgttctacgggcgcacactattcctcagtgctagccccatcagcccaggagatcatcagatcgcagccccgtcttcaaccctcaccgctaccactccaacccattcagaactcatcttcctatccgccttcgggtccccacaggccctcgccgacaaaaggagtccatccccagggctcgcactcgcgccacggaaaactcggtttcattcccatatctgctcctactccccccatgtttaccaccgattccccagccaaaaaagcgccgttccccatctactctacaacctctatgccacattctgccctcttcaccacattctccagcgtcaatcctgaatcatcaaaagaaaacctgtcagaagagccatccaatgacagtttcgcggacttcccagagccgtcgtatgaatctaaacttccaatgaagcgcacactcatggaggctgcacctctcaaggagcgatccaacaagaaacacaagcgtggcgaaacgccggctgcttatctacccgaaccccacgacatgccaccagtcgaggatgatggcaccaagcctccatacagctatgctaccttgattggaatgtcaattctgcgcgccaataaccggcgcctgacgctagcgcaaatttataagtggatctccgataccttcacatactacaagaacagcgaccccggttggcagaatagcatccgacacaatctcagtctcaacaaggcattcattaagcaagagcgacccaaggatgaccctggtaagggtaattactgggccattgagcccggcatggaagcccaatttcttaaagacaaacaagtgcgccgtgccacaatgtctagccttcctcttcctgctgctcctcagagagattctatacctcagtcgcaaaccgcaagcaccacaacatggatggtaccgccacagcccgcttatcacgcgccacatcatcacgtgcctgcccccagaccggctccagatgacttgtcttcagatgcaacattacctgcgtctgaccctgctcttcaggatgatgcagacgaagttgttcctgctcctccggtccgcgcaccacctcgttcctcccctccgcagaccattcggtcatctcctccaatcgctcctccccgattcgcccgtcagggtacccctccaacccccactcactctggccctacccccgcgcctcgcccgcgcaagcgcaagtcaatcactataaatgacagtggttatttctcgtcgttggagtcatccgctctcaggcctaacaaggctgggcatatcttgacatctgatttggatatcgagcctccacgcatcaagcgcggccgtgctgaggaagagatcgcgcgcatgcgcagctcatctcacgatatcagccctggtcaaccagtggtccgcaaaaaccccaaccccccgatcggttcttcgcctcttcgcagtcagtatgtgagcatgcagccgcctccattgacgcctatcatcaagttcaagaagcctgccaggccgccaccatctgtctctcccaataccaatctgcgaaaccatcgccggaagatccagcaaatggtcaactcgcctatcaaacatttgggcctttctgaagatgcccttccttggagcccggctttcaatcttcaggacgagacctatactcctcatgatcatttccatacctctttcgatgtttttgcggatcctggatcagcacaggtatcctatgggtctcccgagaagcgctcactcaaacgcccgcggaacgacagtggtaccactgttcttggggacatcacctcggtaaatatcaatacccgtttgggtatgccctcgttgtcgcgctccaagtccgcaattttccccgagtcgccatctaagcttccagacccgagccgctttggagacgctggccaggaagatttcttctcattccatctctttgatgagagcaatgacagccccggtgaagtcgatggtgttgatctcttgcagggcttccaaaagattggaggcgtgagcaaggacgacactctgaagcccagggcgcttcatcgaccacaattgggtcaccgccccaatacgactttgttttaaggcgctcttaagttcataatttgtactttctttttttgtttacaggtcgagatctctgcgagacgcaccttgttcgatttgccttttattgttgattcttgcatcattctcctcactgtccctttattgccctcctgcttttgtcgccccgcaacctttgtttcttgaattttggattgtacctggagttggttctcaacgatgtttccaaggtcctgtgggcgggtgttttatttgggagtttttgggctgcgctgatggagccggttctgacatttcctccactgagcccgggatggcctggttatgacattaatgacgatgctaagatgtacatgcaagcgatggtttttatgatttggatatcagggtcggggctatctttatgggaaactactggaatacgcattgaaggcgttcttgatataatgtatgtagttagcaattgaaagtcgttatttgtctgcttatcaaactgtttcatgagccatccaagccgagggtatatgattgacccgatgaatggatccaatagagtaattaaagaagaattaaacatagaaacagaaatgcatagtaccgaaacgcccaatccaatggatgcgtgtagtggacaacctcaatccaccactacctcccgaggtccccagccaaattgaagccctccagtcatcgaccaaccccagcctcctttttaatcgctgcttccacagccgttgcagccacagctgacacactgaatcgtctgatcctccttgagctgagccttgggcactcgacagatacacgtggaattgaaattagtctctttcgtttggacacagcgcagacaacacagctaggggaatcagttagtttagtccacttcctgaataaaagtccctcgaatcgcaaactactcaccttctcgtagccctgttttttccacttggcaatcaagttggcatcggcatacttgttcttgagcaggaaatcgtatagttcctttgagatcgcttctttctcgtagtaaagttcatagatgtatcgtgagcctaataagaggggtagcagcaagtcagcgaaaccgtacttaatttctcgatgtcgcggagaggagtaactcgtacgttgatgactgatctggaatatgggccagaggacctcatatttcttctttccttcatgcgatgcgttttccgcatccttcattttgttgctgaattccagcagtgtgtcttcgagatcgtcgaagccagcgggaggcggtttgcgattgcgggcagtgcgaatcggaggcatggcgggcgatatattacagatgagacgaggatgatgagacaaatgtgatgcggatattccaagcgatcgtatttcgatctaacagtgtgtcgacagggtgctttttttcctcttaaatgagaactttgaaacgaaggacgtaagttgctatcgatagggaaaactgcgcgtcatttttgtgccacaccccaccgcctttgattttgaattgcggacatccgtccagctaccgtccagctgttatttcccattgcccgtatcccattccacttcaattgctactcgcatctcatatacaataccgtcattatggaacaacagctcgatctcaccaagctcaccgacagcgacaagaaggagctcaaccaggtcctgaccaacgaggctcagaagtccaacattcagcagagtgagttgtccatctccatctttctatccggacgtataagagatctatacttgatgatttctataccctggattttgagtcgagtctagcgcttaatatattccacctggaatcaaacccatagctaatatcaatccctttctagctgtccaccacctgaacgaagtgtgctgggaaaagtgcatcaccagcaagatcacctccggcaccctcgataagtctgaggagtcatgcgcacagaactgcgttgaccggtggatggataccagtctggctatcctctcgaagctggacaacatgcgcggcggccccggccactaagcgtttacctgtgtgttctcggtttctgctatgatcgctgtctggatggatgcatgtctatggatgccaatcactcttatgaagattggttaggttggagcctgtcatgctctgtttttttgcttcgatggcggttggatgggtttttctttaggggtttatggatggatagacggattgtggaaccatcacttgtatactagagtgtcgatttatgaactaaaccatgttgtcttgtacaatatatgtcggatttgtggggatgttgtaagtagaaaagtgtatcatcgacgctaccatctccctagactataggaagagttgtgagaaaatgcaatatagactaggttacatatgttgaagaatcataacatgtggactgggtatgacttgcaaataatggaaccggtttaactgcaaaggtccaaccttgtaaaaagcaaatgtataagattggcaaagttggctcttggctcttgtctcgatgcactacaagaccattaggccatatacgctacacaaatctacaacagtatactacaacgtggtctggaacatgtcttagccattacaggaccgacaagtccggcgattcttttggaatcgtgcatttcactttcacaagttatgttctttttgatcattcagcccggctggtattttagcatcaccgcagtgtaaaacaaagttcgccaaaaccctaagaaatccttttcgagcattccccgcttagacaatggccaacttggtggcagcaatgtcaagagcatcgacatcgggggtaagacgggcgaaggccttcttggttccgtcagggctaaagattatatgttagttttgattcatatatatcaacagaaaggtagaacataccggataagagtgttgatcttgacggtgtcaacatcatacagcttcttaagagcctgcttaatctggcgcttgttggacttgacgttgacgatgaagacgagggtgttgttctcctcgatcttcttcatggcgctctcagtgttcaaggggtacagaacaatcttgttgaagtccagagcggggccgtggttgacggacacgcgggggtacttgggggaccgcgacagctggagagtcttggggcggtggaagctggccgaggtgcggaccttgcgggacttgtgaagctgttgccacaaccgcgttagcgataggctccaaaaggatttctttggtctgcttcatcttttgctacgtaccgaagcgcccttggcaaccgccttggcggcggcgttggccttgttcttgcctgtagagaatatttcgttagcgaagtggactaaaaaaaaattcccaaaagttcgtccgtggattgctatttgtgaatttgccggtgtggttgcagtaggtcgaggattctgaagcggagtcgcagatgctaagatcggtaggcatattgtgatgcagatttgttctgcgatatgccctggcgtctctggctctttgcgaggtgatctccaaatatcgaacttttttgaatccgaatatcttcctccacgtgcacacggcgaattcacaattggcaaggcggcgatcgcaataggaagagcgcatagttattggaacataccggtcttgttgtcggagggggccatggctgtcgtcggtcgctgtcgatgatggattatcgcagtgtcaaaagtcgaacggatttggagtggtcttcgcttagcgaaaaccctagtgctgtgtgtgggtcaggtgacctgcagcccgctgggtctggtatttttggtatttttcagtcacagtcgtacagtacggttacttttccgtccaatcagaattgacatcgtatttggctcattttcttgaacagcttttcttcacatgccagtgacctcctctgctttttgtatatttgtccctcaaagagatctgaagaaccaaagtattcttgatatcttaatctattatcctaattttctgactcctcgcgatcattaaagcatggctccccaaaaacgatccaagaggccgctgttgttgtcgcatagtcggcctcgcatcgtaaaatccaaggacgctgctctttcagccaaggctacccgcactctaatccgatctcatcatcggcttctcaaagtccgggctcaagctctagccgccggggacgaagcccgagtgagcagcatcgacgctcaaatccaagctaatggcggtctggaaagttatcagatcgccagtaagctaggccagtcgatggaccgcggtggagattcgagcaaagtgctcatcgactggatcaagccgcaactcaagcaatggaacaaagacattccaaagctccgggtccttgaagtcggagctttgagcaccaaaaacgcctgctctacgaacccggctttggatgtcacgcggatcgatttgaattcccaagagccggggattctcaagcaagatttcatggaacgaccgttgccctccagtgatgatgaacgtttcgacatgatcagtctgtcattggtgctcaactatgttcctgatgctacgggacgcggtgaaatgctcaagcgttgtgtcaagttcttgacgtcaaaatgccctattgaacttgttcccagtctctttctagtattgcctatcgcatgcgtggacaactcgcgctatctcaacgagggaagattaggggaaatcatggcttgcctgggcttccgtctaacgcaaagcaagcggacttcaaagctggtcttccatctctgggaacacactggtacctactcgcctaaggcttttaagaaggaagagttgaggtctggcaaaacaagaaacaatttcgccgttattctcaacaaaaagtgattatctgcgcgaaaaaaaaatgctattatactccgtgtaatgctgcaagtggaaactactttgcagagagcatgtcttgcggtaagaaggcgaagacagtacccacggctgccaatatcgaggagacgatgagcagaatccaatcaaggatgtactcgcctcgaccgatctcttttccaaagatcttgagatgaaatgcaagagggaagatgatacagatcgtgaagcacaagaatgaccccaagaaagccatgatacggtcgaaagccgggaagatgaccgccaaaacaacaatcatggccactataaaaacgcgcaccattgcccgtgcgatcctttgccgtgttcctgagctgttttcagcaagaacatggccccctccgagtccacaaagaacttccattgtagccacaagaggccgagcactatatacttgtcagcaatgtccgagaagtagtgaagacgttagactcacttcaagggcactttcgtgagggggatgattgagatgaaaactacaatgcaaacggatagggcctgtgggtaactggtgaccgtgagaatgttcgcagtgatttcgtcgcggacgccatcgccaaacattagccagccaatgatcgccattgagcagtccaaaataaactgtcaactcgttagaattgaacttcatcctgggacttgatgttcttactgtaaacagataggtcacccgaagactcttcccgtatttctgaggatgcctcatatctctgtagatgttagggaagacgccgtggccaccccaaggtgctttttaacaagttagcctcatgatcacgattcctttctgtccttcactcacacataatgagaccaaaactcagagggacggtagcccagttttcagggaagaggaatgtcttagctggctgccgcaaggagcccggtgcatctggcttaatgaagccatcgatgcaaatgagtatcacgactttcgaatgtcagttccatctatcagcacggctcggaagaggacttacttgatgtgcacgaaattatacccaatatgctggtaatactcaggaatcgtaggggcaggaagttgagcggaagaagcacaactccacacacgatcttccattggaggatgctcagtcctggcaccagagcatataaactgtctgaaaagagcacaaccagcgccacacatgctcctaaaagttccaagcagaagaggaaacttgtaaccaaacgggcatgttgcccgaaactgatataagcaagatcggcatacgtcacaacggtctggtcgacatccagacatttagccagcaccttggctgtataggaagtggtaactgccgagaagacaagaaataccaatcccaacccccacccggcatgcttcatcgccaacggaagactcaacaaaccgataccaatcaacacattgaccgagttgaagatggtctgcggaagggtagattgcccaacgatgatattcacctgggtgccatcttcctgttggacatgcttgacaagtaatgggcccgcatccaaatcttcagtcccatctacatgcacatggggatgctgctctcggtggaattgaatcgcattcctccgcgtggaatcactcatccgtgaggagatggtgccatacgatgtcgcaaaagctctatcaaacgacgaagcaagcagcccagcactaggtagtgccctcctgggagatccaggcgctcgtgagtctccatcatcctggtccgagtccgagtcctgaagcagaggccggtccacgtccgagtgccgaccccaggatgggaagtttcttggtacatatgcttggccagtggcaacggcaaattcatcgtccgattgcggttgcgcagagacaaacgacaaccgccgtgggaggacctctgggaaggccgcggctctctgccaagaccgcgcgaagttgtctatactgttgggaccccccgcttggcggactcgaattgagtaggacgacgacctgcgcaaagtaatgagcctaacggtctagctttttcaacaacagaaatcacatacctctgtctaccccccggctcccaatccgnnnnnnnnnnnnnnnnnnnnnnnnnnnnnnnnnnnnnnnnnnnnnnnnnnnnnnnnnnnnnnnnnnnnnnnnnnnnnnnnnnnnnnnnnnnnnnntctctcccccgccggtctccgaatcggcggcggtcggactaccatctagatggccatgatcgtgggagctcggtgtcgcaatcggtatcctccgtgagccatataccggttcactgtcgtgatcttgatctgttccagccctcgacatattttccggttaccaacacgatagtagtagagcagcgacccaagagatatatgaggattccaagttgggagttcccgaggtgaagtgcaggaaggaaagtcaagaccaaggaaaggaaaaactcccctcacttatcacatggagatagctcccagagaaagataagaggcgagagcgacctttcgatattgaaaagagcttagcgtcgaaagagcttccgctggtgtggggtgcggatcccagagatttgataagctcgagatttgtatgtgactaattgaatgggcagttggaatctgtagacaggatatatcatttctgtggttcctctgtatgaggcagtgatatcaggccatatggatgtcactttcctaggacctaacattgtgttttagaaaagtccagtatatacgaaacataagaaagataatgtattgcacatgtttcgcatactatgcaaagccagaagtggtatccatacggaggactccgtagatactcgcctattactctgtgacatgctatcatgcaatatatacctatatatagatagtactacacatgtacatagccgaaagtagcagaaggacatgtataaaagaacaatgtacctgtacctgatcacccggtcttaggccacaacccggcaagtaccaaatacgtcacgccctgggggtagccctggcttacctcagcgtgccagccgacccctcgaacaaacttgtccacggatgtatgtccaaccccacgaggaaatttgctgtcgcttctgaacgtcatcttcagtaaaggtatgtactctccgtggttgaatctatgagtattaagaagaaaacaccaatattcacttttcactcttttttttttcttttttttcgcacctactaactgatcttaggtgtaaaacaggcaagcctaaatctttgttcgccgactcccgcccactttactgaccaaatcttcaggcgtctgcagggcctccgataactcttcccctgatcaactgtcgcctcgccaagatgagcgctcctccgccgaacgaagctgagaagaatatcgagatctggaaggtcaagaagctgatcaagcgtcttgaagccgctcgtggaaatggaacctccatgatttcgctcattatccgtgcgctgccccaaccccgtcacttatggtcgccgctaatatgccaattcagcccccaaggatcaggttagcagagcagccaagatgttggctgaagagtatgtacgtgaaaccatatccctctgatctgtctgcgccgaccgtcgcctaatcgcacaatagggtaccgcctccaacattaaatctcgagtgaaccgactctccgtgctgtcggccattacgtctactcagcagcgtctgaagctctacaacaaggtccctcccaatggactggtcgtgtactgtggtgaaattatcacctcggaaggaaaggagcgcaagattaacatcgacttcgaacctttcaagcccatcaacacatccctctacctgtgtgacaacaagttccacaccgaggcattgagtgagcttctcgaggccgatcagaagttcggtttcattgtcatggacggtaacggtactttgttcggtactctcagtggcaacacccgtgagatccttcagcgtctcaccgttgatctgcccaagaagcacgtgagtgtcccgactgattgattacgatattcatccatactgatccatacagggccgtggtggtcaatctgcgctgcgtttctcgcgtctccgtgaggaaaagcgccacaactacgtgcgcaagatcgccgaattggctgttcagaactacatcaccaacgacaagcccaatgtcgccggtattgtgttggctggttccgccgatttcaagaacgatcttaaccagtccgacctgttcgatggtcgtctgcaatccaaggttatcaagattgtcgatgtttcctacggtggcgagaacggcttcaaccaggccatcgaattggctggcgagaccctgagcaacgtcaagttcgttcaggagaagaagcttatcaaccagtacttccaggagatcagccaagacaccggcaaggtctgctatggtatcgaagataccctcaaggcaatggagcttggtgcagccgaaatcttgatcgtccacgagaacttggaaatcactcgctgggtcatgaagaactccgcaggcgctcaggtgatcgtccacacgactaaggcccaggaagccaacaaggatatcttccaagacaaggaaaccggaatggatatggaggttgtcgagtcaggctctttcctcgaatggcttgccgaggcctacaaggactttggtgccaacctggagttcgtgtctgatcgatccggcgaaggaaaccagttcgtcaagggtttcggtggtatcggtgccattctccgatacaaggtcaactttgaacagcttgccgatcacagcgacgatgacgagttctacgatggtatgttcttccagttttccgttttctatgtgtatgttaacaagaacctctacagattgacggtattgccccctcgcagagagcgaggatgaacggccagaagctcccgcggcgagtcttttgacggctcgccctgtggatcatacaggcggctcccgcgatggaactaaggcatccgtgaaggataaccaaaaaaggcctggtccacgccccgtgaagctgctcagaggtgagacatccagctaggctatcacccaggtttagctctaatgtttgtgtacagtgtcgtccaagctccaagatacgcacactgagctcgcctcagtgtctgagatgaagaagaggtttaaattgcaatttgaaaggttgggtgcagtaatctgcaacgtttggtcgtccaccgctgcttgcactgcttactctatgtaagccggacggcgttggattgttttatgtccccgccagttctgtcgtttcatctctgaatggcattttctggtacttcgctcgttatttgctcgttattaaaaaaaaagcacccgataggtgatagaaggtgctatttattcttattaagttttctgttttatcttgcggtatatgtacactttgtccatatcatcgacagtgcgtacatttttgtttcatttattcgtatagtaaatcggatatctgcaacatatgacataacgttctcagtgcgcttgcaaaatcgtcaatgccttgctctcaagcaaaagaccgatcagtcagtcaagcattgcttgaccttagctgatctttccaggtccccaaatccttacatgtctcagtgacttgacgcaaatcatcgagggctttgtggactgcctctttgttcaaatccgagggtgtccatccacactcaacgaaaaagatatactgccaagacttctttagactcggcctcgtgttaatgctcgtaagattcaagccatgagccttaaagatcaacagcgcatttgccaatgcaccgggagatgaatgatcaatcgtgaaagtaatcaaagtcttgtgcgtggcttcaagggcaggctcgccttccaccgtaggcgggttcggcagcccgagctcggcctgggcagtccgctcatcgcgcacatttctgaagatcagaaaacgggtcgtattgtccgctctgtcctcgatgttttccacgagaatgtccgtcccgtgttgttctgccgcaaagcgattggcaatggcagcgcctcgctccgttgtctccttggagacgatatccgctgccttggatgtggatgtgacgtcctgtctctcgacacccttgaaatatttggtcaggaaactttcgcactggccccatgcctgcgagtgtgtgtatagcttggttatcgagccgtcgtagtctgcccaaccaccggggtatgtgcccttgcgcaccattaggcagtggtgcactgtcaagtaatattctccgcagactttcacgtctttatataaaccattccggtctgccaggaggtccaatgtctgcattacagagccattggttgagttctcgcacggaatcacggcatagtcaacttctttcttttggagagcggcgaaggcatctgggaatgagacttcaggttgtagatcggcgggtaggttgcaaaaagactctgcggcagcctatagcaaggatcaatcatcaagctaagttgcatttgcagggatatgggataaatttgtacctggtgcgaaaaagaccctagcggacctaggaaggcgactttcaggcgagccattgtgattgtggtatggatgggtttctccgtgcttattgagctggacctattgaaatcaaatcaaatcaatattcggcttgtcatctcatcgacaggcgacatcggatctgcgagcggtgtggctgaatcccgcaatgagcgacagacaaacaaatcaaacgcgggatgaatctattgcttcaagtgaacttgcgattatcaaatcgcccaattcagcactggagtcggtgtctttgctcatgaagacaaatccactccggcccttggtctcttttcgaggcgggcgtcatgcatatcgagcttactcctcgctctccgagcggttgcatcatgaactgaccacaaggaaacttccgttgacttacgattatctgcacccccaaccctcgcatctcctgaaccttacactccgagatcttcttccacaatcccagggctcctcggattatgcgactttaccgtcattacagaatccgtccccactcccggccggtcatcacttaatctacttcccgccgcaggtgaccttgtcccaattactcccggactgcacagatacgctacacacgccgggcgaaccatttaatcggcgcctttgggcaggtggaaatctaagattccctgtgcgcagtccgcctctggatggcagccgcgcagtctgcatagaatccattcgcaatgtgacagtgaaaggccgcgagggggacgagaaagtgattgtcaccatcgagcgtcgcgtcggcaatgttcccgaacaagaaaccgccgaccagacctgggaccgggtatggaaagagaacgaagacgatgcgggggaatcgtcagtcattgagaaccgggacctcattttcatgcgcctaaagaccagcgctcaaatcgaagccgataaagcgcaattcggaaagcctgtcaggactgtgaaacgtgaggatatactttccaacccttgactatgatgtcaaatgtactaatgattctggcgcaatgaagctccttccgatgcgacattccgccatgccctcatacctactaaggcactgctattccgattctccgcgctgactttcaatgctcattctatccaccttgacaagggctatactcagaaccaggagggatacccaaatcttttggtgcacggtccgttgacactcacgcttatgctgagtgtgcttcagcaacagctgagtagattgaatctctgcatcagtacctttgaatataagaatatagcgcctctttttgttgaacaggagctggtgatctgtggcaagcctaaaaatgacactggggcttgggatgtatggattgaaggtccagatggaggattggctgttcggggtactgcacggacgaggtcggaatgatacccaattatattccacaattatacattattcaatgcgacagcacatccgaacgatatctttccgggaaatatcttgaaataatagtaacagctaggagtgcgaagctgtcgaagcagatagaacaatcaatccgtcgatggatacaaggtagttacgtaaacaacggatatcggagaaactcccccgaagttagatttgcacacctttttccttccacctgtccttctctttctttcttcaaccacacagtaatttggctattttgtgatcggctgtaatgatctaagtcgtgatcaattaaccatcaagcatcttcttctttctcaagatggatgccttctgggcagctcccccggtcattaggtatgcagattctattcgctgatcccaagctctcatcactgacttgccattcaggacccttactgccttgactgtggttcaatccgctttgatgtatagcggcttagtgagcttctattgggcgctattcgtgccgagcctgatattctcatggcgtccgcagatctttcggctggtcaccccatttctactaaccggacccagattaagtttcatatttgatctaattctcagtatgatgcctcggtatcacattgacttgacctgatcaaattgctaatgtacggacagtgtaccgctatggcagcgctgcggagaggagcatggcccccggagagttcttcatttatctcctatttgtagctttcagcatcatggtgagtgattcggtagaatctgctttttttcatctgcgttcgcgttcatatccaatccctcgctataactgcccgcccagcttcaaaatctagctgaattcggttcctgaaggcgagggaaagcacccctgcatctgtgcaacaccatcataattcgcaaaattcaggtgttgtgcaggtgtgggcatggtgggattgccttcgagctcactggcgtgatttcatatcgcgtcggtatcggaggtgccctacatttctatatacatcatctatcatttccaataccatctacatcctatttactcgtcatcctggtagtccaacaatgtcttccaaatttgctaactttccaaagctcactgcaggtggttatctgggacagcctatcctcctgtcacgtaagcctgccgtaccttgtttaattctcaggctgacactgacttgaactcagccttgatcatggcttttgtctacaccttctcccagacgaaccgaggaacaaagacgaggttctgggtcatcgacatcccggtggtactcctgccgtatgcaatgattgtcgtcggcatggtgatgaacggatgggagcacgtgctgtcagatctcacaggaattgtcgctgcccatacttatgatttcctcacacgcatctacccgactttcgggggtggaagaaacttcatccctgtgccccgcttcgtggagagatacttcaccgaccacgaccccaacagcggataccgaccgtatggaacggcgagccgcgcaccaaggccggctgagccctcgtcggcatcaggatcatcctggagcagctggacctcttcgagttcttggaacggcagaggcgctggccgaagactaggttagatcgagagccgtacatgctctgcgccgttgtcgacctgcatgggagatactttgccctggcagacgtttcaatttttattgtgcccatatggacttgagatagatagtgataatcaataagcacacggttttgggcattgtttgcccacaaaaacagatttattgaactccagtagttaatcgtctttgagtatatctatattgaccaattggcttgttttctcaattaatctatgcgatcagcaaaacctctcctaaattggaagtccttggaatcggaggcgtaaaaagtcgagaactccaggtcacgtggtgccttctccaggcgctaaactgctttgggtactggagctgccgcactcgcaaaatttccttcgacaaattttcggggttttcaccgcgcatccttcaacgacaaccaacaaaatggcagtcgtcaagacctcggagatggactacgccatcaagcctgaagcgtccgttccttccgttgatacatcggattggccgcttctgcttaagaactatgagaagcgtacgcttgtccttaaaactccacgcttgaccagccgacattgacttcttttgtagtgctcgttcggaccggtcacttcactcctatccctgctggctcctctcccctgagccgtgacttgaagtcatacatcagctccggtgtcatcaaccttgacaagccgtcgaacccttccagtcatgaagtcgtggcttggatgaagcggatcctcaggtaaataaaagtccatcagaacccctcaatggtttcgcacttttgctgaccacattcccctctgtagagccgagaagactggtcacagtggtacccttgatcccaaggtcaccggttgtttgatcgtctgcattgaccgtgccactcgcctggtcaagtcccagcagggtgccggtaaggagtatgtctgtgtgattcgtctccacgacaagattcccggtggcgaagcccaattcgtccgcgctctggagaccttgactggtgcgctcttccagcgtccccctctgatctccgctgtcaagcgccagctccgtatccgtactatccacgagagcaagaactacgagttcgacaatgagcgccacctcggtgtcttctgggtcagctgtgaggctggtacctacatccgtaccctctgtgtccacctgggtcttctcctcggtgtcggtgcccacatgcaggaacttcgccgtgttcgctctggagctatgggtgagggccctggtatggtcactctgcacgatgttatggacgcccagtgggtctacgacaacaaccgcgacgagtcttacctccgcaaggtcatcagccccctagagactttgcttaccggctacaagcgtattgtcgttaaggacagcgctgtcaacgccgtctgctacggtgctaagctcatgattcctggtcttctccgctacggtatgtaaatttcttgcccctgagtttttcttgaccattactaattctttcttcagaggccggtattgagtgccacgaggaggttgtcctcatgaccaccaagggtgaggctatcgccattggtatcgctcagatgtccactgtcgagctcaccacctgcgaccacggcgttgttgccaaggtcaaacgttgcatcatggagcgtgacctttacccccgccgctggggcttgggacccactgcccttgagaagaagaagatgaagaccgctggaactctcgatgtaagtggctaagcagccttctctttcgtccaatgtactaacttgctctcagaaattcggccgcaccaacgaggccacacccgcccaatggaagagcgagtacaaggacttcaaccttcccatcactggaacctccgctgttgcacccgccgctgagactaagaccgaggccgaacccactaaggcggagtcccccgagcccgtgaaggaggaagtcgaagacaagaagcgcaagcgcgacggcgagacagccgaggagaaggccgagcgcaagaagaagaagaaggagaagaaggaaaagaaggagcgtcggaagtccaagcaggatgatagcgatgacagcgattagatgcactccaggaaggccgtcaggtccttttcctgtaccatattttgctatttccggagtcttgggtcaaaagggaaatttgttctattccagagtttcatattgaaggctgcctatgtgttgaatctaccattcttaaaaatccgagtaacgttagcaaatgaatcacgtacatgtagcgcttgcttgttatgttatccgaagctattggctgtaatatatatttagttgtatgtatggagtaccggagtgcaaccattttatactttcgttattccaaagcctccttggtactccttagtctcttatattcatcccatttcaatcaactttaatagaatcaaagaccgcagaagtgtagtataaccgcaaatggaggcggtcaatgctttgtcctcgatgtggatctcgtgactggacatcatctccgcatttctttcccctccactttccacttcatgtctaaactcaatcctcaactttatctctcgaacttggatctgagatcaaaacaaacccaagcatcactatggcagcagagctgacatccaccaagctcaacccagagagtcacatcatcctggtaagtattactccgcacctccatgataaagcgggacctaaccggctgcttccacaggaccaaccactccttcgactacctcttgaactggcccgcaggaattttaaaaccgtacaacgagccgtcgagcgagagaaagaatatgtcatccccgcaatcaaagaggccgccgccgcctcactctccaatactcaaacgcccgaacagaccctagctgcactcgacgcaatgatatccagaatgcaaagtctcaaacggaagatggaaggcttgcaggaggaagagaagaaaatacacagccaatctcgcaagcgtattcagcacctggagaccctacataaaattccgagcctagccgatgtcaaatacgaccagtggtcaagggtacggctggaccgtttactcgttgaccacatgctacgctcaggttactcagaaagtgcgaagcagatggcccaggataggggggtagaggatctcgtggacctaggtgtattcacacaagctaaacggattgtggatagtttgcgacgtggagaaaccaaggaagcattgcaatggtgtggagagaacaaggctgcgctgaagaaaagcccggtaagttggaattgccttttcctgtcttgaagccgtctgctaacataattcttatgaagcaaaatcttgaatttgaactccggctgcagcaatacatcgagatggtcaggacacaagacaagtctaagaggattgaggcaataatccatgcaaagaaatacctcataccgaactatcaggctcagaattccgatattatgcgcgctgcaggattactggttttcacgcaggacacaagagccgagccttacaaagtaagccaaacattcatatttaattagtagtgttctcattaatggattacagtctctctttgcgcgggaacgctggaagttcctcgcggaccttttcatcgagacccaccatgagctgctttcattgccggcacaacctctattgcatattgccctttccgcaggactttcagctctgaagactcctctgtgccactcggcatatacatcgtccagctcaaactcacagtcaacatcgacatctgtatgtcctatctgctcaactgaactgaacgagcttgcacgcaacatgccatacgcccaccactcaaagagttatgtggaaagcgacccgatagttctgcccaacggccgagtctatgggaagcaaaggctgatagagatgagccgtaacatgggaacagtgaaaccaggcgacgtcaaagacccaacaacaggacaggtcttccacgagggtgagatgaagaaagtgtacattatgtgattacaatatgtgaactcggacagacgtctaccaaggatgaaacgagatactacaacttacttacatatattttcttatagttttttttattgatttgaaacatgatattacccctagttactcgctatcactagaatcatcatcgcggcttctcttcttccctcccttcttgaccggctccttctgcttcacttcaaagacatacatccgagcctcccgatcctctcccttccatccgccgcgctccccatcctttccttcaatatgccctaccgttctcgcatgagaatagccctcataagaagtccaaggaaaccggaaactagtcacaacaaccagccccgcatgcctcgccaaatccctaatattccaaagcgtatatggctcaccctcgaacagagtaacaaggatctgaccaggcccagtccggaatcccttcccggtagtatcatcgtcttttcctagctcctggccctctcctccttcctcatcctcatcctcatcttcttcttcactctcctctccatctgcatacacccactcatcatcatcagcatccataagcggcggcggcttcgaaacaagcggtatacacgccttgaagaatgcaaccagcagctcctgattcgaacgaacctgtcggttcacatccgtagaaagcccacccacatgcgggaaattgaagcagatcacatcccacgccccaccgggctggtacggtggtcctgctggctcgtctttctggtaccaggctggtctcttgcgctcgcggcgtgcgaatcctgtgcggatttccttgccgccgcctgccggagcgccgagtttgcgcgcgtccaccgagaagacgactttgggggtttgctggttgggattggcactggggttggggttggttgagtcctggtcttcggatttgctttcttctggctggttttcggtctcgttgcttgctagttttgactttgctgatgcgctcaggatatctgagacgttctgaggagcttgcgggtacttgttgtatagcacttctttggaatcgtagcatgtggcgcataggttgcggcacttgtattgttttgcaagagaacgggcgaatgagaagtcacctggttgctgttagaatttatgtttccaggtgtaatagataaatcggtgttgaagcgtgttacatgatcttgttcttatacaggaatgcatattggttccaatctcgtatatcacagtaaaagtgctctgggtatagactccatgggaaaatatacatatatagcttaattgcaaccaaattcttgcatagaatgaagaacgcagcgcaatcatgtcaactaaatcagaagaaaagctcaccttcaccaataaggaggattcgatccttccttaaaaacggcacgataggtctctggttcgcctgcatggaggctttcttaggtgggttggcattaccacttccctgcttttgcccattgccatgctgctgtcccttggcagggttggaagacgggccagatggtttgcctggtccgcgagcgcgcggcggaggggcatttttgactttcttgttattgcgaggcatgactgaaggcgaagaaaaaggagttcactttcaaaaaggaagttatatgaacttgtatgaaacaaatacggagctgtcacctgtgtctgcgactggaagatgatgcagaagaaaagcgccccggataatcaaatatccgaagtatataacgacttcaatcttctaccgccctttggtttgattttgttattttagtccaacccaaacttgaaaatttggtttgcattaattctctctagacataccactggaaataactcaaggtagaagtacatatcacgtgatatatatagttggtacctaagacatgcagtatatagagggctgtcacgtgagtcaatgtagcagggcagaacgcgactccctagtaacgtcactaccaaatttttcgacctcagatcggaccgaggatctaatttttgtaccttttgggtaatatgaatgtatggcattctaattgttagatatattcgaatgatacaaaaggaagatatggtcaagtgaagctaaacgactcgtgatatcaacctcatgaacagacctatccagcaacttccaagtccaagatcatggaacatagaagaaaataaccggaggaataagtcatattatttatagaaaaacgttctattagaaaaaacaaacagagcacggcatagctatatacattgaacaagacaggcaaggatggatgctatgaccgcatgtcaaaacaaggttagaattaaatcatactgtagaccaagagcagggggtcaggggaaaccgcaaaaaggagtctgttttccttcggggaggagagaataacagaaaagaagagagaaaaaggaatcaaacaccaacaccgaccaaagtgatcgcaggatttcccaatcagaccagaaaacacccttgaatttggctgcaatgaaacgtgaatcataatgtcacatgcaaaggagcaccgtggacgcggttgactttttgtatacacactgaccagtcagatgcatattgccattccaagccttaggagcgcagggagtctctcatgctctggctgctggcactgactggagtggggagaacaccggtacggggcttagagttttgcttgatcttggccacggcgtagacaataccgctgacgaagccaacagcgatggcggaaacactggggaaggtgactggcgcatcgaagaagacgagaccggacacggcgataggcagcttgttgagagcgccaaccatagagtatgtggtggaggaggtagtgcggacacaccatgcggatgtgtaagagatgaagacagaggaagcaccggacagaaccatggcgaagaagataccctcacggttggcctcggggaagttgcgggcgaggttggcggatgaccagtcctcgacaagcagggtaaggacgatcaagacggggatagaaaggaggttgttgtagaacatggctggagagaagatcatgttagcaaacaattgaaacaagcgtagaagaatcacatactgtcgaaatccttgaagttggtcaacttgatgcgcttgcgcatgcccaggacataggaagaggtgcacaggcagttgatcaacatccagacgtatccggcgttcagggtggagaccttgctagaggtgtcaccggtgctctccacggcatgcttgatatcagcccaggcggcaatgagcgaactgacaaccatcagaccgaaggagaacagagtaaggttagtgaccgagccaccaaaccagagaacctctccataggcaatcaggataatggtcaagttcttgaagatggtgtagactgggattgagaggaactgaagggccttggaaccagtgtagatcatgccgatcagcaggagcgtaatcgggaaccctaatatggaatcgtgtcagctgggatatctcttagcttgcgataatcggagtccatacactttttggcctcatcggagttgaaatcacggtaggtgataagacccatagacttgcatgtttgaattgccgcaatgcagaccaaagactgttgatattagcaattcgcctcggatcaagactgctagatccaatccaccacatacctggatacagagcaagaggaagttcagattgaagtccaagcccgacagaacatacttgttcatcacggtcatcataattgacgaaccacagtatgccaaaacgggaaaagcggggttgttggttatggcgggattggcgcgcggcgagggagtcggcggcggcgcagcctcgaactccttcccttgatcgatcttgttcatgtcgacggtgtagtcgtcggatttcttgccttcagccatgttgagtgaatggtcgcaaataggggggcggggaattgtgttatcggctgtttcttgaaagaggaaggaactgaaatgacagatagcacccagaatatatctaggggagtcgaggaacaaaaggagttgttcgaggaggtgaccaaagaaaaaaaggccaaaggaggttcagaattcgcggccggaaacagacacgtccttacctaagcaaggcgttaggggctgctgactcaggattttatttatagaccgataactagatgtactattgcattagaaccatacggagtacgagtacattggtagtctattgatactgatagttagggattgaaaacgctcaattatgtcaattacatgatatacgatctaactacgtagttggcagttgtacctttggacttacatattatggctacgtgcataaagtataacgtcttaaagaatatacaaaaattggtccactaactaaaggacaagaattaatgaaatacgtacctcatcccaatcgcagactataaaagccccgagaacaaatttataaaactgttcacgcgtccgtaccgagcccatataccagtggagctgctcccgaccttccaacctcaactctcctaaccacacactcccctaaaaatcccaatccataccttcacattgggacattgggctcaaaagccaaaccaaacagaagagtcgccccaaacccaccaaaacaacaaaaaaacaaccaaatccccaaccaccccccgcactttcccccaaaatgcccgactcagacgacgaagccctcttcgccgccctcgaaaacgaagatgacaccctctaccgcgaccaacgcatccaccaactaaacgccgagctcgcagccacaaaaaacaaccactccgcacgggcaacaagcggcaacacaggcctcatccaaaacgaagtctacccaacactctcgtcggaccagtccgtgctagacttcacgacgcgtacgagcaggtgtctggtgcactttgcgcaccctgattttgcgcggtgcgcagttatggatatgaggcttggcgagctggcgaatgtgcactacgaggtttcgtttgcgcgggtggatgtgcgtaacacgccgtttattgcgcagaaactggggatcaaggtgttgccttgtgttattgggttcaaggatggagttggggtcgatcggattgttgggtttgagggacttgatgctaggggctttgatggggttgaagggtttgatgtgaaagtcttggagaagaggttggtctttaagggcattctgttggcggcgaagattgggggtggggaggaggacgaggatgtgagggaggaggaggatagtgatgacggtgctggtgggagaggatttgggaggaagaaggggagacgtgggattcgggactctaaccccaatgtgagaaaccgaggtgacgacgacgatgacgactgggattagtagtcgattaaggatcttgtttcttgaaggttatacccggatattggaatgttcattcatgatttctgtatattaatggattgatgacccagatttatgttcatagttggatgtttagtagcatacccatgccatatatccatataccgagacttatacaagctgtaaagtaaccacctggcaccttgaaaacctcaactggcactatgtgtacagcatatgccacgggagtaagtcttgggcaacttgagattaagattgaataatcaaagtaaatgggattggagcgagacacgaaaggccaaggcagactgtcatcatagaattacaggcaaaaaaatatcaaagaccgtaaacacagagccatctcgacggcaaaggaaaccaaaacgaaaagaaaaaagcagaaatggagcaaaacagcaccctagagttacaacaaatgccgtggaaccgaggccagaagaagaacaggggggaattctatacatagaagcagaagtagaaacagacgcaaagcagaacgttgtcgcgcatccataagttgcacattgaatgccgggtgcccttgaaaaaccgagactcgagagaagccggaactggccggactcaaaaagcaaggcttattctaaatagccacgttcttcatttcgccaaggatctccgactcaatggcggttgaggactccgcggagtcggttttctcggattccttaagttctttgggcttggagaacccttcgttctccttattggagatttgcggggttacaatctccatgagatcttcagtctgaggttctttgttttccttggtgtcttcggagattgtgggtcctgcagtgacaacgggacttgtggtctcctcagtcacgcgtgcaagagggctcgacacgccgaatggcgtcttggggctctgggaatttccacccttggagaaacggtgcggcgagcggccgcgttcttcggcgcgcgtggggctgccgtagggggactcgcgactgctggaccgattgcctgaagcgctcacacccagaccattgggtacggggcccttccggcgaggtacacggcggccatacttctgatcagtcctccagcgcaagatatccaggtatgggggctccacattttgggtcttgaattgcttcaacttcagctcattcgtctcctcgtcaacaatgacgtcgccgctgcacagatcgtcggcgagagtcgcgaggaagctagaccacgaccgggcaaccacgtatttgcagtcgtaatcccggccgaaaataatcacctggccccattttccagcggggccgggtgccagatcaatggccaggttgttgccgccccaatcacgggcgaggggaatccaagcgggatgtgagtaggccttctgaactgcaccaggaggctgggagtcctgacggtcgagcagttctgattgccacattgtggatgagggttgctgagacggaccggccgcggaggagcttgctgcagagctgggtgcgggtggtatagttgcgttgctgagatattcgtcgttgacctttctccagttccgccattcctgaacgatctcctcgcagtcgagtagcatagcgctgaagatgacaccggtgggtaggccgccacgttcttgaccgtcatggaccattaacgattcccgcacctccaatggcagactgcagtcgagttcgtgctccaattcgttaatatcgttttgggtacatccttcaccgagctgatcaaggagttcctcataattgtgttctaaccagcgctcgatcttcctccaggagtgagcgaccggtggcggcggtggtgctccgtcgtggaaactttgcatctgaatctccggtgcaccctcaccttggtcgttcgatcgtctcttctgagatgcgacggatctcatccctggtgagtagggatgggtgggggagcccaagtcgtcggagccattccattcggatgcttgtgcccttgcagatccttttgtgggctcgtcatcataggggttggagagatctgggcgagactcgattgcgctagttgcgacagatgtgagcggctcatggcgactttggctgagagggacgtgtcccccggtacggtagggggagtcgtgggaggcatgccggtcataggaggtcatggtatgccaaaaggaccgccatgtcgagttcaacctgcatcacgtcagtaaacataaaccttcgaagggtgtctagagtctagacatccaaaggtagactaacatattcgccatggtgtcacagtagggaaaaaaaacagggcgcaggggggttaaaaccggtatttaggtcgcgaaagcggtcattggagacgggaagaacgtgtcccgacgcgggaatgatcaatagagaattcaaacttcaaagagagaacgctgagagaagggagaaaggagttgttgaaaaagtgaagatgtgaagatgtggtaggggcaagggaagtccagaatcctgaattaggtaaggaaggagaaaaggtggaggggggaagatatggagattatttatgtgtctgtttttatttttcttggaaacacaagggttttgaaaaaagccttggaataatatataggatctcctttcaatctcaatatacttactgagtcctttgcttcagttgttatgatatgactctattccaccaaacccctggccgcatccagcgaagcctcgacgctgtggtatgtagatccttttgatatgatgtcgataatccatcataagcttttgaatgcaacaataatggggtatcttgccaagtatgtgtgttttagtactttgctgcattcagtcttcaatacatgccttccaggctggatacaattacacgtgggcagtctgtatctgaatgccattgtccgagccgccaaagcaatgaaaattagagatccccaactcccgtctgatatgtgtgggcaaggttgggccaaagaagcggagtacatatacagaaataggaacacagaataggagagtttggagtgccgagttcgggttgccttgactgccccctaagaaaccacggaatacagccgagggcgaaattgatataaaattagtcgcggctgggtggatctcggggaaaacaaatgtggctgacgaataggagtcgttagggttgacaatagggggaagagtccacgtttcaaaaaaaaaaaagaactattatatacgaatgtacaatgtacaatataggatacattaacatattaagcctgcgaaactattcagtgataccacgatgtagatccctcttattgaattaaaatatccataggaagaaccctgggggatattaggatccgcactgggttcaacttctcataggctagactccacatcggaattaggaaagctgccaattttgattcgtttcaaacgatgtggctagttcagggcttggtgcaatcttggtcttggcattcaggcacatagtatgttgtagtcgttgaccctttgttattcccttagcttgatacggagtacggagtatatctttatacccgatgatactatccctcctatactcctatacctccgaatatgagtagaggctcttcggccggtggaacatcgaccagtagcttagggaacaccggtcaacacttataccaagttctcatcttcacaacaaccagtatttagagccgacgccaatatcatcgtgagccctgagtgagcatctcattcatagtcacgatactagtgcatgttttccattagcctctggatttgccaatttttctgttcctatcccccaactcgcctttcatcttcctagcccctaacccccacaccagccgggcttggtttacccttttgatcaaatcacctctctttggagagcgttgtcttctcgtgcaaccttccccgagctcggacttacctggctatacttcttcagcatacacacacaccttggaaaagtccgatatgattacactcctcgtgtcagttggatacttcacgacacaatgtctgggtcaagccgtaagctcatattattgacttataagttccaaatctaattgtaccgaataacagtcattgagccaaatcgatgggaggagattgtcgaccttccccgacgcctgttcgaatggtgtgcttggccaaaagacactcaacccgaccccgtatcggcagattggctgatggggctctggatcaaaattccagctgggtcatttcttacggcgagaatactttggaagcatgtacccgtggaagatctcgtagaccagtctgagggtgaaatgctcgaactcccaccagacgtgagaaaaaaggccatggattgctgtctgcagttccgtcagttcgtgacatactgtaccgacatcgaggattatggtggaactaagcccaaggattgggattgggataggttcgatcttggtccattcttaaccattcgcagcctccaattcacaattcgccgggataaagagagactaaacgagtctgacgatactccttcactaggagccgtaaaccacctgtaaacgcttcggacacgcgaaaagatgaagagatgcgggaagcccaagacgtgaccagcgaccctatgtctactgatttaatgtgagagatatattggagattgaagaagctaagctatgaaattaagaaatttgacaagttggctacttgagaaagctaaaagttagacgctgagttctgataggaagaaccatgatccattcaatccagcaagagggtatttataccctcgaggctaataagcaaactgctcagtctgcaagcaaacaagtttgaacaatcaagcattaatgggatgatccaacaagttttgacgatcttcaagcccctttttgctagtatctccttgtacaactggccacgcccattttaacattctatcaatcgtgtcatagtatttaggcaagtcgatgatgtcaaagtagtttttctcaggtgggggctcgactgcgaatggtgtaaaatccacgaccccggtaaactgaaccctcaacctaccatcaaaataagcatagaggaggcggcaatgcccatacaaatcgaactgttttccggctagaagaggccaatctctactatacggccgtaacaggtatacacaatacccaatatatagatctattgagacttcctcatctcggaatacgacagtatctccttcgtcagatagggtatccctaggacatagacgtaattaacttacgtgctgcgttagtaggtatcacgactccatcggtataaagtaacatctcctcagccacgtgcccagtcatattcagtaataaagaacgagaggctgtcatagcggaatcgcaagaatggaatgagtctgaacagctgctgtcccagataagagaatacctcggtatagacctggaaggtgggaccgagctagataatgtggagagagcggtggagggcaatcgacaatttcgtatggaaatgctacggcaagcagaagtggacgagcgggagatttgttggcgaaactggccgtataaggatgatgaagatgtgaagatgacagcatgcctcctgagatctaacttttgatgagaatagtatgcttattcatctcggtggttggtatgcctagtcagtaacgctagatcctcctgaaggatctagagttacctgatatatttacatacaggagatattgttttgggtagtatgtacggagtaggtttatctacaatgtcttggcgtcttggcatgaaccaagaggctacaaagtgattcccggggaattcaacgaggcttatcatatgtacacacggagtccgtccacggtaccataaaggaaaacggtcgttagttatatgtactatatattacagtctcggtaattcaaaagtatacccatttgctttcacgcactattatagtactacaaacatagtggttttcgcggtatagcatctacatagtatagttagagatggaaaatccagtatgttcttacgattctaatattgtcctagtatgcatataaccaaacagggctgagatatctaatctgcaagaatatccatagcgtcagatctactagactactaccatgtacgactacttgcactccataatcggatccaaaacctgaccagtgataattatcagattgagggacgagcacaaaaccacaccgatgtggactagtcagatatccagaaaaatgcaatccccatgaaacgagtggcgaggatacaccaaggtacgaagtgccacatcagccctaggtcagtgttgaaagactgaccgaggttgaccgctacttcgaccaaacaaaagaatagaagagttgaacagcgaaaaggcccaaaataacaaggataaacgaggtaaaaggaaaaacaaagaacagcagaatcatgcatttgttagcatccctccatgccccaagccaaaaccaggcgcgccaccacatttcggaaaaaccacgacgccgaacgatggagaaaaggtataaaccacctcatcaatttaccaagcagccagtgccgtgcattatcatcatggtgaacattgcgaatattgccgcaagagacgtatggaaagaacaatgagcaccctgtcgcgggaaaggaagactagaataaaccaaccgagggacccgagaccagtcgaggatgcccgtatgaacagaatgcaagaagaaacagagtagatcaaactgatgccagttaaataaggaaaccaaagagaaaaaagaacaaaagaaacaggccattcattcaacaaaaggagaggacagacaatatcatatagagaagatcgtcatggcagaagggcgattgtggagctatgcgaagcttcgagtgaccggaggtcccgaggtatcaagcttcagaactcgacgaatgtcattctcgatttgcctggtgtctaccacacgagaaggagacggtgagctgaccggcatttgaaatggagacgccgcgtggcttggttggggggaagcatatccagaccgctgatcctgggaggttgccatgtacggattaccatacggcgccggggaacctccgttcgaggcgcggtttgagaccgggccacgatagggaggcatcgaaggaggcgggacgaggtcaacctcacggcgcagaggtgagtgagaatgggtggggtattgatactgaggacgtccagtgttctgaggaatatgctgctgttgcagctgttgattagagaatgaggaatgagacaaggtcaactgagggccagacgtggttcgcataggagtggcatagggaggcacattggaaggacggggcccaaaggatctagcatgatcgtgagaagcataagccgaggaaggcggcttctgcgggggtggattgagtaacaggtgcttcagctcctcggttttgattcgtcgctcctcctcagtcatgtcagaggactgggaggtactcgacggtcgcagcgcattcatacgatcttggtaagaaggagcgaaagaaggaccaatgtgtaagttgcgagtgtaatcagagtttcccatttcaaatgcaaacatgccatcaggattagggcgcaaggctctgggttcggtctgaggggactgaaggaccttgttcacctcagggctgctcgtggacttctggtctctggcttgcacagcagccttgaaaagaaagtcgagaggggaaggcttgggctcttcagccttgaattggttgctgcggttgcgaggcttggacggagtcacatctggttcggggtccacctccgcatcgtcactatcggtctcgatgggcgggaccaaattgggatcaggagccgacttagagaaaaagctaggaatgggtaaagcagatggtgcaggtgatgcatggaacgtcggtcccgcgtaggctgcgctcggctttggctgaggagaggtgacagcaggctgcgttggtgtgtatcggggaccactgttatacccgttgctatggtatccagatgtcgcaggtgaagccttgctgtcccggggcttcttccctgaacgcattggcttcttctttgaggagttgaagttggttaaagaatccacctggatgaccccggggctcatgttatgcggtggggatgatgggggagtagagaggagcgccggtttctgggcgtgaggggttgtattcttcttctgaggacgccggttgttgcgcgatcccttaggggttggtggatgaggagattgggtcgacatgtcgacggttggcttgaaaaataggcagcctggagagagaggtaaagagaaaaggcaacgctatgacgaagcagtaaaaggcagaagatgcggagattgcagcaaaatgagtcagatcactgctcagcaggtgtcgacaatattaaatatggcaacgctggggaagcagagaaagtgacgtgtatcaaactgtggtagtgaacgagtcgcaagttgagtcaaagcagacgctcaaaggtaaagatagacagtctattaaaagaacttgtctacgaaacggagagtgtgacaaaaggtcaaaaacgaagatcaactggagacatctctaaagaggaaaaaagaagtaaagaagaggaagattgaatcattgttgttggttgaagggaaagaccatcgaatgcagacaaacgaggaggggactccgatcccatctcgatgactaatgacgccacctgcttcacgatctcaagaacaaaccaagtcaaacagaactattgactgctggacagggtctcattgtcgcgttgtgcattgagtacccttggagatatctgttgttctaactcccccaaatcagaccttgtccgttccatctcgacgctctacactacaatcaccgctcaatcaccgctttaacctggccatcggagcctcacttacgtcagtcaccgttctgatccccccacctcagctagcttctgttgtctcgcgccaagcatttcaaaccgaccccatccaaattccgacgagaatctcaatatggccgacgtggagatgaaggaagccgctactggctcctccaagggcaaggccgtggtcaaggcctccgataatgccgacaagaagaagttcgaggtcaagaaggtacgcaaaagatctactgtttgcagcgactcatgatactgactggctattgtcaagtggaacgctgttgccctgtgggcttgggatatcgttgttgacaactgtgccatttgccgaaaccacatcatggacttgtgtacgctgaaactaccccccgacgctcttttatcttacaagctgaccgaccgatgaaacaggcatcgaatgccaggccaaccaaggatcatcaacaacagaagagtgcactgttgcctggggtatctgcaacgtgaggacctccgcatcaccccatccgaccatgtgatcataaactaatacctccgtttctatagcacgcattccacttccactgtatatccagatggctcaagacccgccaggtctgccccctagacaaccgagactgggagttccagaaatacggccggtaaagtgggaccaggggtttcaaagacactacacgatacaattcacgatttctggctgatggccgcatgcgcaatggctataacttgaacttttttttttttcaaagacgcttctggatctttacgacggctagggattggcgggcgttcgaacgattgatgtgtcgagccagctccatagtttcccattctcatattccgtagcagacaagaaagcgctgccatccaatgattattacgcttgacaatttctcaatagcttattgcaccttcaccccgtccacagttatacccggagttgccctcgcgcttgttgaacccaaccacttctctgggttacggttgtataccggccagggcgggacaacgacgaaagctgtgaacagtgtgcccgccaagccagtccataacgtaaggtgaatgtctttgtagatgtatccgacgaggaaactggcggcctggagcagataaaacaatcgtcagctcgctctggtaatacaaaactcaatatctgtgcaacatacccctgatataaccagcaagatggtcgacagtaggtctgctagacgttggccgtggaagtcctgttatcaagatcttgttagcttcgatggtccaaaagcgcagagcaataggggcggtgcggcggagcgtacgatttggccttcaatggcatcttgaataggggcgagtaattcatccatgattgaagcaagttaatcagattcgaggtcaacacgccggatcccttgatcgatgccgggcggcttatcgcaatggtgtcatttgtattctgccatgtcggaccgccttgctctctacaatgtacgagtcgtacggagtgcacgacacttcgtcaaagtacgtacacaaaatacggatcgaagctgtaacataatttgaactcaatgatttttccttgagaaattgacccgatgttaatcttgaatcattacgtggttgatcatgatttcattcgatatcatctgccatctatctctagagccacggtccaccggagcactgctggtgggaacctggcctcgagaaactcggcctacggtcgtgtaccggtgtacaagaccctgcaaatccaaacttaacccgaatccaacttgccatgtcggaaggctcacatgcaccctgcaatgcgagaagcaaggagcggtgaaacgagatcttgatggcccatgtggtggcggttagggaaagatcatccttcccatatccaaccaaatacgcattcccccgggtcccaatgctgcaatgctgccacgtgcttgtatgtcaagcgcggcgaatcgctgactcacatgcagcgattgtgttgtgacgacacaaggcgccggtttttaattataggtgacagttgcgccatcctgagcaggctccagcagcttccattggcacgagatattattggaagcgaactgcgcgataatgcggtcagcaatctcggtgaagttatccgtggccagtgccaggatggtaggtcctgcaccggagagacagattcctagcagaccgggttgagtggccggggtcatgaattggagaatttcagtcaatcctgggatcagcgtcttgcgatacggctggtgcaccttatcctgcatggcgaggaagatcatatcaggatccggcggggaacttcccaaggccgctgggaggagtgccgcgcgctggagattgaagacctagccgaggattagtctggaatcagatagtttatcaattctggacattcacataccacgtccgctctcgagtaggtctccgggagtacattacgggcgttggcagtaggcaccacaaagtccgggataatggcaatggccttgatctccggggcccaattgaacttcctgtaatgaccaatggccatgggtggcgcggggggtctgattccggtgtccacaccacctgccggagcaggcaggacttcactgagggggatctctttgcgtgccacgtcctcgggcttaagctcattcagataggtgcccacgaacccaccgaagagggaggcagccacattatccgggtgccgctctgttctcacgcgttagtaagatgtacgtacgaatcatgggaatttttttccccccccgaggactcaaatgaggggcacatagaacactcgaacctaccaatcatcaaacaaaaatcgagtagtcgttccttgctcagacccagcttacccacctcattgcccagcatgacaccggcgaccaccgcagtaccagaggagcccagaccccggcctaacgggatggggttggtgatatgcaccttggtctcaacggggaaggcccgctggtcatgacatctgaggacatacagggctacacgggtgatcagattgacttctggatcgagactgatcttctcaacactcttgctttggtcctcataggtgatggcgcagttgaaggggagctgggatgagggtttggcctcgatggtgacgtggagatccagatagagagacaatgccaggccgatcacatcgaatccggggccaatgttggccgaggagcaaggaatcttgatcacgaaggaagtcatgataaagatggctatacgtttgtgtgttacaggggtctaaacacacaagatgtacaagatcgtctgatagtccggtatgtgactctgagaactcttggcgccaccaaaaaaagtggccgacgtcggaaacgtaagtggagaccttttcttcattaatcgacgatttcttttgattggatttgattggatttgtgaggatgtcaaatccgatctcgaatccgattgcatatattctgcattgtcggtgtgtgtttaccctatacttcgtattcttgcacatctgttccatgtagaaaggcgaaacttgagaaaaaggggctatttttttaccgagatagattgccctagaatactattgtgtcatataacctgaaaatagccaaatgccaagggcaacaaaggtccaaggccaatatgtactcccgtaggatggtagtataggaccggggggaatgcaagaagtcaaagccgcatagatgacattcggcataaaatgcctcaaggaattactctttgagtacgaaaactatgttgtacggcgtactccgtagagacaatgataataatatgacaggttattttatagtccctcttatagacctgctgaaacggggggtacccgcttgcaaaattttcacctttgtttctccctttttctcggtcatatcacctcctaacctccccccccccccccccccccccccctctcttcatnnnnnnnnnnnnnnnnnnnnnnnnnnnnnnnnnnnnnnnnnnnnnnnnnnnnnnnnnnnnnnnnnnnnnnnnnnnnnnnnnnnnnnnnnnnnnnnnnnnnnnnnnnnnnnnnnnnnnnnnnnnnnnnnnnnnnnnnnnnnnnnnnnnnnnnnnnnnnnnnnnnnnnnnnnnnnnnnnnnnnnnnnnnnnnnnnnnnnngtatatcccccccccacccccccccccccccccccactgtttttcttaccttctcctattattgcaaccccctgaggttctttatattgaatatcccatatcttcaacccttttgttctccccagtggtgactctgtgggcttctggaaccacctcggcatcatcgactctatttggtcttcgccacttccacccttcccgcttttcccactgaatcccagcatcttacgatttaaactagaattttcaattgatctctagtcttgaagcttgagaactcgaattcgatcattaacgtcattgaactcgcgaacctctcgcgcctctcgtctaacagcaaccctggagccaccaagctcctcatcctcccacttcttcaagttggcgggacttcgctacaccgaggcctctctcctccaccctcttgcaggccccaagttccgggtcttcggcgggggcgataccagacccccctaactgggctttaggattgtctttattgtggccgctagacgtcagtcggtaacgctagaccctcccgaagggtctagcttatggatggagggccgtcacccttgaacgaacctcttaccggcttgcgtctgctccggtcgttgtgcgcttcaaaagcgaatatcaccaaaccaaacccccaagcaaaaaatcagccaatctggcgccctaatcattttcgtcgaatcctcatatactgagagcccaccatgtccgagtctcccagatccgagaagtacatgtacctgaccaggtacagtactccggtacccgaactggatgatcaccgcctgcagatgcagacgcctccccgcattgaagctccgatggagcgttcttacagcccgcgcgataccactcaaggtcctgaaatgctcgatcgtccagacttgctcagtgcgcaagatgtcctacaggacggtccaattccccgagactttgaaaatgccgcggaggacgatcgttcgctgaatgaatttaatggactgggtcggttctcgatcgaccacaacgcaacgtaccagactccgcgtcgcatcagtgttgtgaacccggaactcgccaacgcttcctgcgcctcgtctgtttccgctcgatcatcctctcctcccaattcagttgaggcttttgccgacccacgtcgccgtgagcgcgccaataccctggacagccatgcgcctcccgacctggaagctatcctgcagcgcactgtttcgggtggcacccacaaccggcgcccaactttcagcaacgccagtgttgttcgcccccaattgggcgatgtgccattcgacacagcagaggaggcctgctttgacgcgccaggccgtattcccgtcattgattacgaggaactcgaggagtttgtggctctaaatccgagcagtaaaatcgccgatggcgatcgccgcaagcacagcatgagctcgcagagcaagaggccccgcatattttacgatctccgtcctggcgctgaaagccctgagatgggtccaattcagaagaccagctcaactgatacactgagtgaacatgaaaagaaggacgccgaggttacagacgaaaaggagcgggttcgacaaccccatactacaaaccagcgttcccgcttcggcttcttttcgtctgagtctcaaagcacagtgcatgctgccgatttgggagatctggtgctccctggcgaaaccttccgcgatctctttgagctcgggcctgagggaggtgtgtggtggttggatgtggtcaaccccaccgatgaggaattgggagctatctcccgggctttctccattcaccccctgacaacggaggatatccaaacccaggaagcccgcgagaaggtcgaactgttcaagcagtattattttgtttgtttccggaccttcttccaaatggacaaaaccagcgaggaattccttgagcctgtcaatttctacatggttgtcttccgagacggtgtcctcactttctcttttgaggacaaccctcatgcatccaatgttcggaaacgtattggaaagttgcgagactatgtgtctctcagtagcgactggatctgttacgcgatgatcgacgacatcgtggatagcttcggccccgtgattcgggatgtggaattggagtccgaggcgatcgaagaccatgtgtttattgccagagttgaggatttcgaatcgttcctccctcgcatcggtggcctgcgcaagaaggtcatgagcttaatgcgcctgctaggcggcaaggctgatgtcattcgtggattctccaagcgctgtaacgagcagtactcggttactccccgtggtgatattggtctttacctgggcgatatccaggatcacgttgtgaccatgatgtcgaacttggcgcatttcgaaaagatgctcagtcggtcgcataccaattacttggctcagctgaatgtcaccaacttggtgttgggaaaccacgtcaacaaggttctcagcaaagtcactctgattgctacgattctggtccccatgaacctgatttgtggtctgttcggtatgaacgtagaagttcccggcgcccacacagaaggattggcgtggtggttcggcattcttggagtgatcgcaggtattgttgttgtgagttttggcctagcccgctggcagaggctggtttgattcttttttgtttattgctcattgcctacttttccttgacttgttcctgttactttgcatttgcatgttgattgactgcgatcgtctactttgatccattttttgttggtttcaagactacgatacctacttgatacatagaatacatttcttattcgtttaaacaattgacttattgaaagttgtgtggattgcatcaagccaaggagtatcattttagaatcattcagcctcatagaagcttagtcttagcctttgactgtggtttccaagacctcacagctgacccatcatatatcaaagtctcatttggcagaggaatatagatggtacgcgtagtactacgtgtcctaaataaggcaacaaggcaacaaggcagccaaattgataagactggcattttccacgatagccagcctcatccaaacaactttcacgtcgactgcatgcagccgctgattttgcctccagcaagaggtttacagctggtgtataccaccgcttgcctgtgataattttattcgccaactccaattctggccattggctgtgcagcgacacctccctccgtctttccatgcgacgccaatacaacgcgctgcagtgctatcttactgcaacgattagcgcgatcttccttcttttcgctgtcacggtcacctatgctgatgcatccgatgtcccgggtacagagaacaccttgagcctccagggggcggttcccagcgacggggcaggattcccacttgcgctggactcgttcaatgggctagaacttcgcgacagtgtcgacgaagatggcgagtcaaatgggctagagctcgtgcgcagataccctaatgtcgcgaaagcattgggcaacaatcagttcgaggcgccgggcgcgctcgagatcggcgctgtccagtggttctatctgccctcggttgtggtgaacggcaaacacgacccgaaaggcgtgggtcttcctgcatacgtgaattctacaaatgaagacgacgatgacgatgactcgacctatgagctacggaaacgagacggggacttctcgaagcgagcgacgactacggtctacttgtcgctcacgacctgccaaaaaccatctaccaacaagaccgacctacaaggcgagttcccgcagttgcagatgtatgtgtcgacttcgcagaaattgcaacagccaggaccgggcaaagacgattcgctgcaggatatgcacactgccgttggcgggtatattggaatcaccttagatacgaataccgacgtcttcgtcggcatcgcagcgcccaattcaaccgactacacaggatattacacgtaccaggtcgcagcatctatcgatgcctttttccacaatatcgtggacgatgacccgaatttgttcttcatcgacgcggacacgtcggccgcgctgctggtgacgaacaacttgactcagtctgcgaagaattcgacaaactaccagcaatggatggacatcgtccctccgtatactatgtttgcccacaatatcaacgatacggcactgcagggcttggagaaatcattctgcgctctcgatgcgctttcgcaggtgggccgaataagtagttcaaccgaggttggcatgaccaatcgcggacttgggaataagcccaaggaacaattctatatcactggactaaaccgaagttcatcgtacagcggtcttctggcaatggtgggcaattcgaccacgtccggaaatggcatcatcggcggcggcggtaaggtatggcgaccgatgaattttacgaccaaagcaggtgagcaagcccaaacaatccataccaaaaagtgactttatctaacaatcctccagaggagaactgcgccgtgctattcaacttaaccttctgctcagaagtcgcatacgcagtcccctccaaccccaaactaagcgtcgacaagctccgcacaatctacgacgactacgccgccgccttctaccagaacttcacctattccctccaacaaatccaatgcaaaacaagcgaagaatcgatgttttccctcgccgtggactgcgacgattgcgcaaaagcctataagcaatggctctgcggcgtcacaattcctcgctgcgcagactacagtagcaacgccacgtacctagccgtccgtaacgcaggccaggccttcatcaatggctcttccctgccggatgacagtccgtaccgccagtccgtggcgtcgaatacatcccgcaatcctatcatcgatgaggagatcatgccgggtccctataaggagatccttccctgtcaggatatctgtcatacccttgttaaggattgtccgtctgcccttggcttcgggtgtccccagggcgcgtggatgaattcttcctatggctatcggaattcagagggtattattacctgctcttatctcggggctgtgtattatttgagtcttggggaaaagctgggggctagcggttgggtgactagcttggtggttatgggaattatgtatttgctgtagataggtataatcactgtgaacttgtgctatttgggttctcagttatttcttttcttgttcttgtctcctctagatagcaagagctcgacctagttcgcctgtgcaccttaatattgcgcttagacttgtatatcatagagcaaataatacatacacatgtaacaaacattaccactccagatctttcctcttccccaatttctcttctttcttctcactcttcttctcttctttcaagactccttccccttcttcaaccgccctatccccccatctctccctccaaatcccaatctcttgcttccacaaatcccttacacagggatcacacgaactcccacagcaatcacccagtcctagtggaggcggcgggtcattatatccccgttctcctgcacggaggagttgttttgtgcgggttcttgttagacgggtcttgtagagctttttgtagagaggtgtttcttcaggagtgtaatatggctctggggtgggttgtgtagttgagtctgagtctgatgttggggcatcgattgatatctttgttggactctttgttgtctctttttctttctccttctctttgtcgttgcttggggatattgcggtggttggctctggagacttggccgagaaagagaatggagcgagcagacttgaaaggaggtttcctggggagtatattgaagatgtggatgtgtctttctctttctctttctcttcctctttctcttgttcttcttttgttgttggtgtctctgccggtataatgatctctttggctttggtgatatttccagatgttgatgccgatgaagcagtctgactctctgatgtctcgatactcattttgatatacagatactgaaatcaatacaagcgaattgaatcatatgaagaccaatttagtctctgttcaaaatctgttatcgcgttagtaacgtttgaagaattgatatagttaactaaagcaaacccacaaattctaggccaaatctaatcctctaaatcttcaattgcgcaaagatgtataatattcataggcacgtcgttgcaataaagaatggaatgagaagaccatgaaggccgaagaagtaccgggaccggctaagaactgttttcgtgcggttcctgttcgttccgatgtccaccgactcctatgtttaggacttggtctatgttgcctgaactggtattcataaataaggcataattggcattttttggctaaaaaagtaacaatacgtccagtaccggtatctgtgattgtttcccggggagaaagacatccaaagaaacgaaacgccgttcgagtatatcaactccgtggtatcatgcagctaaaaaatataaaaagtcgagccataaactgccatcattttcgcttcggcgtaggcgtccaaacatttcccagtgcagacttccgctcagacctcggcgtccctccaacctgctgtaacagcttttgcgctgcaggcgtaagcatctttccctgggaataccccccaccggagacagagcccctactagagctagcaccaggagtagaccgagacccaaaatccagccggggactactaccaaagcgcggtgtcaacgagacaggtgtcttcgtaacacgggcggccttttcagcacgcttgttccgcgccacacgatcgaccatgcggtgatgcagggcttcgcgtttgcgagtttcgccaagtttgaagggatttggcttttcagaggtcggtccgaggaggcgccagtcggcttccatgtcgtcggttctagagtatgtaaattcaggttcgggctcgtcttcgtcgacaaaggcgtatccgttaaccctcggggtttcgcttcctgcgaaggcggatgcggcttcggactcgctgagacgcggccggccggcgatggcatcttggatggcggatagagagggcgaagggggcacggcgttggcggcgtccgctgctgctgcggcatgtgggtctaggagtctggtattttggtagagagttcgcttggggcctgcccgagatgtgatttctgctttctgcgggagtgtctcgtgggtatcctccaccgagttggggaggaacatgagggtgttgtctgggcggcttttccatgtgtctggatttgcaggacgggcatccaggtctgttttgatggcgggctgggcatgctcgtctcgttttataagacccatctgtgggtttccgccttgagccgtgatgcgcttaatttcttgttgctggtgtgcaatttgtcgggccgagggaattttgttcccgctccaaagccagggatatttctcccgtcgcttttcattctgcttgtcaaggactttgttgaaggactcgttatcttcgctggtatactttgcctggaaggcgaccagtcccatattcgatacatcgggaatatgtcggtcttctgtttcggttgccgctgtggaagtcgatacgacggacatgggagtatcacctccccagccatgtggagtgtcacccgggcgtccggccgggaaatgatgtggtgtggctggcgccgatgcatagtctgattttcgtcttgcattcgaccccggggtgggcgtgcgcatgacgcttgccaacttcttcttggagcttgcaatccatgctttgtctttcgattcaagggcttccaggtactcttgtttgatctgtgtctcgagcaagcccggaaagaagtcgcgagcaataatgtgggacaaagtgttcgtgtagacgtcttcgtcgaggacagttgcagggcgtttgattcgcttcgggggtggtggtggaggcataagctggccagcagattgtctggccagctcctgcgaagggggagacgccatgtttgtagagcaaaggctgagggagagaataatgaaacctggaagagaggtggatgaattagtggcgataagatagcgggtcatatgattttgatctaaccgctttaggcaaccatacttcagatatcactaacatattgaattgatagatcatatcatgagctaagtagggtttaggtagaggatttagataaatcgtcagataggcaccagctgtgagatggcatccaaagccaaagacctatctagattgtaaagcccaggcttgcatatacatccgatcttactaattgaagcagcgtatccgtaatgcttttttactcggagatctttattggagagtgactctaagatgtaagccatgcttcatcttatgaaactttctcagatataggcagtgacattgtgttggaaagcagcgtcaaacttaacattcgttcgcgttctcctggggttttcgctgagcccgtaagcatggccagccgtcttgcccaaaaatctcctctcaaaggtccggggcgtgagtaaaactgactccaagtaccagcactgcaatggtgtagaagatcgtgatttccatcggtcaggacctatgtaattgatttcctctgccacatcttggcattctctttccgtattagtgctcaggccttgctgctttttgctcactgagtagatctaagcacgccactgagtctcagctgagcctaaccagtgtgtcacgtgatcttcgcttagtccgctcccccttcttacaatgaggaaggcatcggtctggagaccctcaccttcctccctcccttactccgttccttcctcctctcctccttccttctaaaattccccttcctgccttgtgatggtccgttgataggcgggaatcttttgcctttccaattgtatgagcatcaatatctgcatattcatcaacctaggaactcctcaataaccaagccaagttagtctaatggtagggcacctgagggacataacctctgatttttagggctcccaggtgagctaggttcgaatcctgggcttggcggcttctctaaatttattttttttaaccttgatgtctctcatacccctaggtatcgtataattccatgggtatctagaaatatacctatcagtacacattggtggaattatttcgtatcaaatatatgtacatactctctgtttcagtctttctgacgtggagagagagggttgggcatagcgaaagtgaagccatttttgaattttgaggatctatgggtcgttatcttacgtcatagtatatactaccttcaatactattgggtagaaatgagccgtaccccaaaacaatagcggccccacaaccttatttgtacataggaccgtggaagtacgcttccctttcaacaatatcacgctttctaactctcttttcaaagtgctttttatctatcaattactctacttgtgcactatcagtcctcggccaatattgagcttcggatgaaatgtcccgcccatttagagctacattcccaaacaacttgactcgtcgaaggagtttcacacaggcgcggacaccccatatcatacgggatcctcaccctctataacgtcccattccagagcgctccgaaagtatcctctacgtattaaattgcggattccgaaggggccctctcgccgctctccactttctgcttcattaatctgacagaatcaggcatttctaggcaggggtgcgcggtgtgatctctgtacacgatcgacttggaaagacatgaaatgtagcttaaaattggatgtataaatttattgttacactaactacagaccaggctttctttcagtctatatatacaaagcagccagctggtgacatctgtcttccctttcgatatctctctccacgtatgatatattcagaaatatttattcatagatatatttatagatacccatggatatacttctaccatttataggttccaaggtcttttatattcgtgtcaagcctttttgggactatactctcatcatctttcactcatagcctgggttatcaactcctcgcaacccgagaagtcttttctgccctttcatattcttctaatctgataatatttcttctttgattactctcattacctacacaagtatatcatacacgatgtttgcttcgacaagaacaaaccctcctagcactgagaaagcacttcagagcgttcctattatgtcttcttcttcagcccaagatataaaccaggatctcgaacccacatctgttacctatcctaccccgaaagttctaggactggttttactagacgtccttcctgttgagctagtgctactagtagcattttttcttccccgggaggatatatacagcctctcactttgcaatcatcgacttctcaaaatattccaaagtcagacgaagcacaaactgaaagcagaagccctgttgcctttcttacgccggctcgaacatgataatccaagatacttagcatgcgacgactgcttagttctccatcacttcgacagaatcccagagcctttgcggatcccagacccgctagttcaaatatcaccctactacccacccctccttggttgcgtgcaaacggctagattctggccagttccaattgcacataattatgtgcggatgcccatccacgatggacgcagcacccattgtggctatagactccactggtctcatctccacctagccatgcgcggattccaccacggtcccgaatacgggatcagcactgacgcgctggccttcaccggagtatcgcatgaactgattgcaggaaacgactccggattggttctatcttcggtggaggcgcggatatgtcctaagcccgcgggtctgggtctgtatatgcgattccaggacatgattgtcgcgaaaatgacatggctcggttcccaccatgaaggcttcaaattctgctcgcatcaatcaatgtcgttttggctggaggatatgtatgggaacgagacataccagccggagttttattcgaattgcgaggagtgcaataccgactatgagattgggtggctcagaaacgaagagcttcggaatatcactgtagtggtgacgagatgggttagccttggacctggtcttactccggatgatccccgatggaggattaatgcgtactgtgagacgtggggtcagcctcaaggtctgaaactggagtcggaggaaaggggtcctagtcctcggtggacctttgaaggactgactgatacctctgttgatactttgacttcgcacaatctctcctacatcgaagaagacaggtatcaggctgagatggtacgagtttctgatgtgccttcctggggcctatggaagggggcgccttggtaaatatttagttgatatgtggctttgtagataaacaggacatgtgatagtcgctgctcgaatatgttgtacgtacagatcctccatcaagtatttgattcaaggcagtcagtcattgatcctgcagaaagaaccgtaacacaacccaggctgaaatcccactccacaggtcttaactaaaatccactacacataactactctttttctctacacctatacttgcaaagtaacgccaacgaatggtattgaagcctatcagctcctctataaaaatcaaagtctataagaaaaaccagagactagcgaacgatccaaataaattccgaaatttcctccaagaaaatccttttcctttccctctttttctcttttttcccaaatcgcccttccaagacaccaggccagtaaaaatcgctatcgctgagaaatgcatggacgaaagattgaccacagctgaaacacgcagaacagaacacaaacaaaaagatatggcatataggcaaagacaagacaagtcaggcataaaacagagacacaaggaaaacacagatcgtggactcgttgagagatgttgatggagggctatcggatgacaaagcgagaggtgtgagatagatagtcatgcaaggggtgaggaaaggaaaatatcaacataaaaaaaatggggttgatgataacgatagtgacatgtactcagtaatcagtgagagatgatcagtgaggtgatcagagagaggtgatcagtgagaggttgtggggaagagagagtaagatggcgagcgggtcttcctacggttcgggtttctagaaggaacaggaggcaaaggagcctcggttttaatcggcaggggctcgccctccgaaatggacttggcgcggtcatggagtggcatgggaagatctgcaccctcgagactcgtgctgctgccactctgaaggaggaagtgcgcctcggcgagactcttggtctggcggtggtgggaggatgatgtaggacggctgagtgtctcgccggcggtcatgcggtctgttggcatgagctcgcggctgctggacaagctatggacgagctcggggacgctgttcgtcgtcgagatggaagagcggtgcttgcgcacgatggaggctgcgcgagagagcattagactctcttgcgagttgcacttgcttatcggggaaaagctgctgcgtggggagatggcgcccatcatgccctgcgcgaaggggaagtggcggtctgattctccatcagtcgtcatgtactcttcgtacaatggttcgtgggagagtggtttccccattgatgggaggatcgaggaattgacgggatggaagtagtctccgctccgtgcgatgaactcctgctcatagtctgcagttgagggggcctgggaagggattgactgggctgggctggggtccaggtctggggttgctagggcggaggtgctcagtgggctcggctggagctgtcgggttctcggggcgagccaggggccctcgctgcaggctgcgccgacttgagtgtgtccttcgtccatggatgtgccagtccaatcgaagttggaagtggactcggctgcgtgctcatagcagtagtcgatgtctgcgtcccatgagtcatacaattcatcctcatatgatggctgcaagctggtgaccggctcgggtggtgtgacctgcacctgggcgcgaggggtgtgcatgttctgaatatattgggggatagtcggcgagcccaatgcctcggagaacttcctagaaagctcctcggccacatagatcgacaccggagctttgcgcgcgctgctgggcaactgagtgtgggctgggggtggactggcttgaaaggctgagcgagaaggggggcattccatgctggactcggggctgtcccacattcgggttccttcctcttcctcggggacatcttccaaatcatagtggctgctcatggacgaggtcctggcgcggtcatcgggttcgggactgaaaaatcgggttggctgcgctgtttggagatctgggtacgtcatcgtcgtggacaagcccaggatctcgtcaatggcacggggtgccggctcatcagtcccatgtgagggaggctctggcacagcagaaggtgggggagtggtagggctggttcggggatatctggagactggccgcgagaagttctcgttgacgcgggattctctgcgtgcgtggtttgcattgtacagtcgtgtttttggagaaaccggtgggcttatgctgggcacatccaccgtggtggcagtgccaaacgagcgcaggtcatcactggagaaattacggaaatgaatgtcctcggcgcggatacctttcagatcaggctggggccgttgagatgctcggatggccgagaactcggtgaccagatcattctcgcgggtctggtccaaagactggaactgcgagggattggtatgagtcaagtggtggaaatcaaaaggatcagaaataatgcttttcaagcgttcgcctatatcgattgtcgagggtcaattgggtccacaatttccgctgcccgctgcttggcgcacttactgtggtctgtattacgggcccgacggccaaaaagctctctctctggccgggccttctcacgatcggcctcatcttcctcgtccagcgtggcgacaatgttgatcttgctcccctgccggcgcaggatgcggcttccccgcgccaaaagggaccgggacggcctatccttctcggagcggaatcccaatgacgacccggcccggtcatcggagacaatggaactatccgtggaggtcatcgaagagcctggtgagcggcgtgaagaagttgaggtggtggtattgcttcttgaacggccgctaaaaacggacaaacgcctggggctgttggcgtgggcagtggacctggagcggatatgtgcggcatattcaggttgctcgttggaagagttcgtagacggacggtcactgccgtcgtcgttgtcccaggctttactcattggagggggtggataggtcgacatagtgggaagtgaaggagagaaactacaccatgataagatgaaatctggagatctccgccgcctacaatataaaggagcgaaagtggaaagggagggttctcgagtggaacagaacgaggtcctgccgatgataataaattaatagaatacttgatgacgggggcaatacaagacacggagcggtggtggagccgcgttcaggggcgtatttattgtaatttttatttcttttttttttccattattagtatatgatgctatagtcctcctatattggtgttattccgatcggtttggttggtttctttgtttagattggagcggtcacaccatgcacccagccggcttcattattgatcatattccacgccgacaatccaaaaaatgaggaaacaaaagaaagcaaaccccaacatacacgggatatagtgaggtgcctcgaacacccccatgtaaaggacgggaattcccagcgtcgcggagccgatacccaactgccttagtggcatatgcgtcgagccagggggttggtcctgaacgtgctggagacccgcgtgtgggggagccagaaagacgctaggccgcatgtagtaaagtatcagcgttccgatacgccccgtctggcgatttaatatgtttaatctgtatttttggtatttttgccgtacctcaggttccaaggttccaaggttcccaggaaggtttaccgttagctttggacccatggacacgggaaagagggggacacacgatatacgcgatcgggcttatagattgagtactactgtagtactacaggtacatggagatgagcctagatatgtacttcgtatagacaaggttgccattgggctagatattcaattgcatatccaattggcgatattgaaacagctctatacttgattctttatttacattcgagtggggagacaagcccttatcacgattggggcgcacactggaaccttggtcgtctgtttttctcccttaaaacattgtataagtatcagaactacatatggtggtttgaccttttcttcctacatagctacatgagtataatctatgccttgcgtgaggtttgagaccagtcaggaacgcctctttccttccccgcgtcatatagcggagcctcggttcaacggttttatcacagaaggacccagccctaatgtgattatagtgtgcactgaaaacatagggctcgggaaacaccagtcctagatctcaatctactttcggcatccggcagtggggtccagaagcacaaaagtccataataacattgtattacaggataatatcggtttaattagcctaggcatacatgtgctacagcctacaccggcattcctccagttccccagttcaacctaaacatccctgttggtacaagatggacaggcaaggatctccatgcaagtttgttcttgtgatcctaccgagctgtaggggctgatcacttcgcaggcagcctcggagagtgccggtctcctatctcaggcatatccaagcagacttttttttttaattaaaaaagggaagtgaaacgtatcagactacaaactcacactgtgtcggggatgcgagacgaagctgaagaatgtgagtatccggcagtcaccgcacccttacgttatgtctgtcggagagttgcattgtctcagggcggggtatatccattgtgcctggtatgtgcatattatcaccctggtagtacgtactgctccatacggacgaagtacatcgaatcgaatcgaccgagtataataagcaattctcgcttggtattgtcgcacatgattacttttcctgccgttatggtgactcgtcacacacatattctaatattcacgtcgtctgtagtccacgcttcctatctagtaagtggaccttagtctgcagctagcatgattcgaaacaagggagacgaccgaggggaaagccaaaaacagtttcattctatttcagagtacggagtagaatataccgctagttgtagtgtgtatcgaagtgtaaagtggactcctgatgatcttatagtctagaacgtggactccggtcctctgtaatgagaactctcctccattatgcatacatatgtaatattgtacctgcgtagtgcggcacttgatattcttaattacttatatagctctctgctccgtccacgggtccactactgcgtactaggatcccctttcgagaggtctaacaagcacgttcccccggcggttcgcgtttcgtgtccatgatcgtcatcacgcaccgtactccgtactccgtacctttttatatctaggcctaaaccgtcttcttcttcgtcagatttgtgtcagaaaatacgccccgagattggagtgtcgtcgactgtcagatctattctttaagtttttttgtcgcaattttgaaacaaagagatcaaacagacgcgtttctggaatatactgagaatatactccgtactgataattaattaaagatgataaatagtaaatgtagctagccctagaatataatgacaatgacataggtgtagagtcaaggtttagggacacgttctggaaaaggagggaaaaggagcgaatccgaaaatttttagtacccatcttcattcgcatggttcgccctatcacgaacaccttcctattcatgcctcccgaagatcgacagctccaattcccgtgaaagatggaagctggtccccgacttcgggagtcatgtacgtactccatacctttaaaagccaattgcaactgtggtcttccgttttcccgctagacggccataaattctaatggtagtttagtatcgggtaacgcgctatcaacgtagactgggcatcatcccacggtcgcctatctcggtcaagcatgtaaatatgtatgcgcccgaactaccgtgtggagaatggatcaatctaatattccaagggtgtaactacaggggtgattgatatctaccataatggaggctgaatatctcaaactatattccattccattggagggagataggcgggttgattgtccttattagatgctaccatgtgcgacgatcccggggtttcgatcctgatgtaacctagcgttggccgttgaattaagtacatgataactaactagttagggcatgacagggatcagcggtgttgacattacggacaggggactcctttcatgttgctaggcattttgtgatacatgtgactcccaagggccaaggttgggctcttcgaatgaccaaatatgagacaaggaatagagactattggaaatagtcgattatccttctttctttgagcacccgtgctctagttatgcatcataagttgcatacaaagcattggaaatataggagtatgttgtattgaaatattgaagccggcactaagctcattacgataagtgatatcaagccaaatctataacgccagtcctttgtctttcgagcccagatttcacgagtccactcaattctaagtcccatgttagctttggtcttctagacaaagggtgaaatgcccaccgctcgatcatgagatctagttgacagttcattcgaggttcggttatctccctctttgttaccagattctcggagcttcggtcctggttgagagtgatggccaactctaaacgagtcgtggttactccgtacttcacttagcaactccagtggtcttgtcaccaccgacattggcagcaatgccgagctcactgataacatccgtctcggagcgcttcgcaactccggtggtctccgcgccaccgacattgatggcagcacccagcttgccgatcagatcagagctagagtcatcgtcgtcactgccaccgccgtgaccaccgccgccatcgccacgcttagcgacaccggcagtcttatcaccgccgatgttaacagcaacgccagcatcaccgatcacatcgttctgtttggggacggggactgcgagtgctgtgactgctaacaggatgggagcgatgagagtgtagcgcattctgatatgggttcagactggaatggtcgttagaactgcttgagctgggctctggtaggtttgtgctcacttatggtagagaaggtacgtttgaactggactattcttaactggacttggagtgaatagaggtaatctggctagcaacatccctaggcagatgagcaggctatttaagtatatattgtactatcgtacatgatatctggatagatgtttgcggcatgatagctgatgtgcttcaggattaagcaccagcttagactgtattctacttggacgaggtggatgtagacttgatctatgacatatgcgtagttgcgatgggtggatgcccaataagggctacggattagcagtgggaagactggaaacggtgaaggtcctagtcctagtaattggccttgtgttcaacatagaggtatgcgatgatcgtggcaaagacaacaacaatgatggagagaaatgatccgtcgattgtagtttgacgatccttgacttatttgggtagtgacccccaaaacgatgcctgcccttgatatcatcggtgaactcgatgctacgctgcacctggatttctctaaatttcaggttttgttcctttgttttcgttttttttttgcaaagtgagtcattttggtagaatcaggctacaggatattttataataaactacatttgaatatcgtaataatctaatagagcccaagacgtcaagccctaacgtgtcccgtcaagcttaacgaaaataaagttatccatccataagagcaggaaccttggcatatcgaaaacgttggaattcttctagaatcttcgaagtattgtttttcccctcgattgcctgactctacctagaatatacctcggtcccactaactaggtggtacccatttttccatgtcgatatagtggctttcaatggtgtcttacgatctcccctacgtactctctatacctttctaggatctcgaaccttgaacctcgatccgggtactccgtacggagtaaataattacgtgtgcatcctgagattgtctgaaaagtccaaatcccaaatcccaaattcgatctccgatacgtactttgtcctacgccaccgatcagactaaatgtccaaaagtagcacggagttccgtcgagtgcagcaatctcacctcaaccgctaaaagactcctgccaaaaacatgccctaatagacgagatatagcccccaatgcgacgctggcaactgcatgagacacgggcccctcggatcctccacgcctacaccatacacctgctaccacatgcagttggggcacgtctaattcactagccaagcagctagacaccttctggtatagctgctcggtgctccgtagggatgacaggggtcaatcccaccagtgaccgcacgtgcaaatccaacatttccgggcctgcgcaagccatgtctcagatggctgaaccgttttgctagctaaggaattatctccaccggaattccgaggggagttggggccctgccagattcgtgttaccgaatatggagttgcatgttcggtagattaattcgatgcaggtgctgcgcttgggcctggcgtgggtttctttttaatctattttatgcccctgccatcttctttttggtgctgggtgcgccgtgattgggtggttcttttgttactgaggctttttagatctgtcaatgccggtatttgaccgttccttgtggtgttcgcatatcggctttacataccttagtgggcacggagtagtacttggtgtggtatcttggttaattgcaagggacctttgttcgataatgtacagggttggctttttttatttttctagattttgtagactcataacgatcaaggctaataattacacatggcttgaagtgcattggggtaaatgtatcaattgcagttcaaatggccccttgccagacgcctggatgagaaaatggaaatagaactttgaatagtaacagaaagagtagtggtaatgaggcagaattcactcttgcatctccgtgtcctcggtagttttcgaaggctcgccgaacagttcgtcgtcgtcgttgtcttcagtgacaaccttttcggcttgcacttcttgttgcacctcttgctgcacttcttcttcctcgtcctcgtcctcgtcatcgtcggcaatacgacgagacgccttgccacgacgacgcggcgcagcttcttcagcaggctcgtcatcgtcaccaaacagctcgtccttgtcttccccagcagaccgagcagcctcttcatcgtcagagtcaacaaccatctcactgctcttatacttgccaggcttctcagacttggcagcctgggccttcccgcccggtcggcgttccaagcggcgtcgcttcttaggcgccgcttcgccctcgctctcagccgcgctgtgcacagcatcggcttcttcttcatccgcgataaaatcatccccacccttctttttgcgcttgctggtaggcttcttcttgcgcttgacccggtcaccggtctcggagtcgttggtcaattccgcctcctcacgagcgcgctcgtcttcagcgcgctgcatggcatgtcgttgcacctcttcgaccatctgcgcgcgttcctcggcgatacgcttcttacgctccatctcgacctcctgggccttgcgcagctcctcttcccggatccgcgcggcttcttcgcgggcttcacgggcttgctgaagcttcgcggcattcttctcttcgtactccttctggctctgcatggctcggtcaagctgcttgctgatggtgcggcccatgttggctcgctgctccaaagcggcgctggggtaaggcgggttctcctccttggaaagacgctcgaaggtttcaatggcctccttgagaccctccgctgcctcttggacatcctggagcgtcttctgggtaggctgcagaccgtacgcgagcgaggcgatttggttctgcacgaaagcaacgttgaattgcaggtgaagttgatccggagagacgtcgcgtgcgcgcgtggcgtagtcgagtgctgtcttcattgcggccaagtttgcctcctgcttgcctcgtagccaccatacacgaccaagacaagccaagatttgcacatcacgctggcgatccttcgacaacgcagcctcgtagtgttcaattgaccgtgagaactgacggagctcagcgaagacatgtcccaagttgaggtaaacgctggggtccttgaccgtatcgcgaaccttggacaggatttggacagcagagctgtggtctttcttgtcatcgaccagggcgatcgcaataccttgggccgcatatgcgttcttgggatctagctggagagccttgtcgaagaactccacagcacgctggtaaatcttgcgacgcttttccttgtcttgatctgtgtcgcggcgcatgtcacgggcagcgaggagatgaacattgcccattccagtcaacgcgtagcgatcatgtttgtcatagtactgcaacgtgtgcttgaaatggcgttgctcgctatcttcagcaaggttggcaactcgtttcttcgccttgctaagataccatccgtagagtgcccgaacttccagattcgtgctgtccgcttcgtaaagcttgccaatcttcttagggccctcgtctgtggggctctggcgaagggcaatatatgtaatacgtgcattagcttccgtgtagtcagagtgacgctccagaagaccttcgtagaccttcttagcttcgtcccacatatcggctgcctcgtaagtccgtccaaggttgtagcctattgtggtgacgagcgcatcggtatccgtgccatcctctttttccttggactgcacgcaggcgttaagtgcagactggaacaagccacgagctagagcaatcttctcgctctggtataggaagcagcccatgttgttgaggagctgcggcgggagactctccctaagagcagcgttcatctgatcctggtcctcgatgtcaggtcgagcatcttccggaatttcagcaatctggatctgttccagttgggtcaggcactgcatgctcttatcaggagctgtgccctcgtagagacgggaaagataaacaagaaccgactcgtcgggggagatattttgtttctcgtccttccacatagagcgcactgactcaagcaaagtgatggctcgctttgcctcagtcgacttgtcttccttgctgcctgatttctgagcagcgaatacttcttccgcgtgaatagcagcaaggaggatcatggcctccgggttcttcgattgctgaacaatcttctctagtttgaatttggcaccgtcaaagtccttgttcgcgatctgcatttgcacagcgccgaatttggcgggaagataacccttgtcgactccaccgcgggcttgatcggaacggttgtagtactccgtggcatgggcatcgtcgccttcatagtgcgacttgcgaccgaggaggtaccagccgtcactggcaatagacataacatctgtgtgctcgatggctttgcgtgccaatgtctcgacggtgggatatgatttgcggaggaggaagtagctggcaaacagggagcaggtcatcgggtattccttgtccagcttgaatgccttctgggtgtattgagtcatggctaatttgtacattgacccaaacatagggtcggtggtggctcggcgagagctgtcgtggaggtagtaaactgccagcaggacgttggcaaccttggactcggggttctgcatagcgatgacggttagttatggtgaaaaataaaaccttgcggaactccctctcgcataccagagacaaagatctctcccaagctaccttggcttgatccttgaagcccagctgccacaagcaacatcctagaccaatacgagggtcaggatctgtgaggttaggcatcttgatcagagccttttggtatccttctagtgcatctgcgtatcttcctagcatgtaatgcgcgcgggcacgtcccagaatagccatgatgttccggccaccaaaggccttggatgactcgtcgaagcatttcagagcctgccgcagcgactcgactctttccgaggtatcaatcgcacctggacgaacagcacggggcgggtatagtgatgcacggaggagacacaagacaccacgcgccaggaagagaggaggataagccgggttgagtcgcgaagcctcgttcaacgtcgacgtcgcaagttggaggtagtgatctttggtcttggattccgagtatagttccccttcgggcgcaactcgaggggcatgtcggctctttaacagcagcatccagcagatccagcccagcaggccgagtttctcctttgtcgctccgtgggcgacggaggccagacccttagtcaagatgtcgatggcatggtcgatctgctttcgcttcgcgtaagcgagcgcaataatcacccagaaattcttggccgctttttcgttctccaagagggtgcaaagctcagtcgggtcatcggggagctcgagcaagctgacttcgacttcgctgtcgaagctggacgcgggaatatcgatagcatcggggatatcggagaagcgcaagctgctcaatgggctagctgcaggtacagcatcaccgttcaggccattggtttggccattctcaagaggcgccatgatgagtccgggaacgggagggatgaggccactttgcgagtcggtatgggattataggagcctcaactcatgatcaagcgaggcgatccatcaaaaaaggtcagaatcaggagcgttaaggttagcgaccctgagtttggagaaaacgcgaaaaattgactctcggagacaacagcgcggcgatgagaggtgagaattgaacgattggagtggctgggctgcaccgccacaggacgccacaccgcatacaataaacaacacaacaccttttggacaattgaatgatcactttccgatgttttcgaaatgaataagagcaaaataagtggagaaaatggcatttactaaatttactagtagaatacctaggtgcggtattcatccctgcacccagcttgttacaaatttgcaaagcaaagcaacactgagcagcaccccgaagataagaccaagctcactccagtggcgcaggcgaccataggactcaacatatccagctgtagcagcaaccagctggccatctattgcattatcggctttgatcgaaccggccaactcggatgggaaccggcccgtttcgaagtactgatccataagttgatccttctcggcccagcgtgctgtaagccagtcctcaaactccttctggtcatcaagaggaatctccgagacgttgaagcgtctccaatgcatgttgactgaggtcggcggtcgtccttgcagatatgtggagcgaagagtgaagtatttatcgggatagcttccctttctatagacggacttgtgaatatcgttctactggaatatagggagagggaaacatacggtggcccttcataggctatggtgcagtcatacacccagtctacggttccccgcaactgctgaagacagaacaacagccctgtagaccgcggaagaatcacgtgcttgaatgaaggcagtccctgtttctgcccccaaatgtcgctgcgtctcttggtattggtggacaggtttgtcccctcggggaagattagcagccacatgggatcgtactgcgggcgggctgagttggagcccccgtagacagtcttcaacttctgcaaacgatgctcaagccttggcttgtcagacgtccacttgcgagccatgaagataaaaccgtagaacatcatgcccgtgcccaccaatgggatatacttaagcgactctttcaggatgatgaagaggcggccatgcatctggttggtgtatgcaacccaccaaaggtaaacccagtcagtgtagacctggtggttcgagatcagaacgagacgctcggggaacctggtctccagtaatccatctttcgatagatggatctgcccacgcacgctagcatcaccactgacccggaagagcgtcggagagctccattcggtaagagcagcgaggaccagtccgaagctttgttttgtatatgccatatacgaatagtagtaacgtttgttgatcagatacagcggggagccgattacttgtgtcacgcagatcgctataatacagcaatccacccatgtcatcagcagaagtgaacgcagtaactgcatgggaatgccatgtttgagacggggatcggaaggtggtttggtcgagagctgctgaagatccccgagatttgcggtcggcggcttgcgctgtcgaacctcggcagactccatggtagaagttcggaggttcggagatccctgttgttttagagactgacaaatgaggtagaaattcaagtaatagactggaagctagtgaatgcttctacagctgtacagagcccggtctggtcggatgtggagaatcgagatagtgatgatcgatagtatgggctgcaacaaagctagacagaagctaggaaatgaaataaattgccattcccttgaggaaagaaggggattataataaaagcgattgttaaatcaaaagagataagtgttggggagctgaacagttggagagttgaatagttggaggggaaaatcaggcggatctggtggatccaaaatgacggtcacagcctcataacgtcacctgagtttcttattatttactttgacacctttttctttgtgattcatccaattctctgagatcccggagctatacaacttaaaatcaactgttgtgtcaggtcattatacgccagttcctacttcgggctgaaagatggcgcgttgatgtgagcaccgaccaactcgaatcctcattggagtcctccgggctgatacatatgactagggtcgataggcctgcgattcttcttacaacatgctctgtgccatcatccgcagaagctcgcgcaggagttcccgtctcgccttgcgccagcatttttccacgtctcaaccacgtcacgaggtcaaagacatcggctctttgtctcagcgcctaatacccaaataccaaggtgtggcttggagctgtcttattggagcggtcttattttgttggtaggaagactaatatattctcagaatcttgtgacggagagctgctgtgtctccagtggccagcaccgccgcgaaatatcttcttggtgcgcaaagattgcgccccggcggttacagattccctgattgaattcgtcaagtaagatcgagagatgcccacgggaagcgacttgactcaaggctgacatctacgagccatgtttcctctacatacccatctatctcggtgatcctcgagtcaaagactgccgccgaagtacattcgtcgctctcttttcccgtatactcggtttctctcgacgaaaaaacgaccgcccttcatgataaagtcgacctcacggtgaccctgggaggcgacggtacgattctacatgcggcgtcgcttttcgcgacctgctcaaacgttccacccgttctatcatttagcatgggtacattaggcttcctgggtgagtggaagttctcagagtttaaacgtgctttccgagaagtctacatgtctggtgccggggcaggtgctcgcacacctgtgttagaaggcccagaagcgacagtcacacaagaaattgagatgggcccgaccgggtggtcttccgtccggggaaaatcaatgggctctacgcgcggggcacgcattctgatgcgcaatcggttgaaggtaggactgtttactgccgacgggaccgaaacgacgcctatccgaaccaaaaccgaccagggtcagggagtgtatgtgatgaatgagctgctcattcaccgtggcaaagaaccgcacttggctgtggtagatgtgtttgtgggtgggcggttcctgactgaagctgtggccgatggaatcataatttccacaccgaccggaagtacagcctacagcctgagtagcggtggtagtattgtgcatccgctagtcccagccatccttctaacgccgatctgcgcgcgtagcctcagcttccggccattggttctcccttccagcgcccccatcacgctgcggctaagcgaaaagaaccgtggacgcgaactcgaggtcagtctagatggtgtcaatttaggccaagggatgggagttggtatggaagtccgagtctggaatgaggagatgcgtcatgggaagaatgagtggcagggcggtgtccccagcgtgatgcgacggagtgtgggaggtgaagcgcatgagggctgggtaggtggattgaatggattattgaaattcaaccatccatttggcgaggtataacattgtacgataatataggatagaataagaagatcaaacacgaccccgtacaaattatatcaagtggaagaccgtggatccaatctccttaggagctgatgtgattggcagaggcttgttttctgtagatgaacttcccaagtactctcggccctatctcaggggacatctcttccccccctttccctcttcattcttccccaacactcaacttgcgattcttttattgattctttgaagtctgatatcgcgttgcttattcttgagcatcctcgcagtgcgaggaccgctcctcatttctagacaaacaggtacctattctacccctccttcgattccctcgatactactctactctctcgttatcccgggaagtgagtgtgttcgagtgattctctcgacaaagagaaaatccctgaattgtttttttttagggcatcctctccctgaatgcagttgctaattcctgtctagtaactagcgctagccggtcttaggcctcaggaggtctcggcgcattcgtttacccatactccctcccgccccctgcgcgacctgggaaatcccttgaacaatgacttcgtatgggaagtacgtagtcgcaccatctatccttggaaccccgaatctggtggaattttactcaccctccatagcaacatgtacgcgccggagcagttcatgaatccggggccagccccccgaccccctaccgatcgaccccccaagttgactctacccaccaacagcacaacatcctcctttggtcagatgagctcggactctccgatcacaccgggtctgtcgtcggcaaatctctcgcttttccccaacaccagcagtccctcgctggctgtgacccggagtaacactacccaaaatggaatctccattatcaaagaaggcaccgtccgctgcaaagaggacaagttcttggccacttggaatacgcgttacttgatcctgcgcgaattcaaactcgagtttttaaagagcgattccggcaaggtagtgattaccttccctttgtccacggtcaccgctgtcgctcgctccgaggattcgaagatggcctttgaggtcactcgcctggccaacccgaaggatgcaaactccaaaaccgccctccttgctcgagacctacctaccaagaccatcacctgcgaagtcaaatcggacgatgaaatctacgagtggatcgacaagatctacgagcgctgccctggcatgggcggcgtcagcaatccgacaaacttcagtcaccgtgttcacgtcggctttgaccccaacactggcgcctttgtaggcttgcctccagagtgggagaagctgttgacatcctcggctatcaccaaggaagactacaagaagaaccctcaggctgtcatcgaggttctcgaattctactcagacatcaagatgcgtgagcagaacccgcaatactatgctgggatcaactcttcgcccaatggtcaacccaaggcatacggtagtagtgttggaagctccattgcacccccacgtcctgccccaccaggacctatgcagcgccttgatagcagtcagtcgaaacaatctgaaggttctatgcgctctgcgtcatcttccgtcggacaggcggaccgtgcggcagaccaccaacagcaagttgaccggatgaaggaaatagccgatcaagagcgtcgccgcgtggaggaggaacgtcgcaacaaggaggagcaagatgcttacaacgcatccatcccgaagggccgtcctactatggctcaacaggagcttggtggttatggcggcgacgactcgtcacagaatagccgctatcaaccaagccgtccagcccctcaggctccaggctctgctgctcgccagcaagaccgacagctcaccgcacagcgtcccgcacccgcgccaccgtcgcagagtccttacggccaaagcgcagcaccgggcgctcctcgaaccgatgaccagcagggctctccaagctcccgcagtgaccctcgggccccaggctctgccaaccgtccccagcagaacggttctaaggccggaccccctccgacacgcctaccggcccccgttcaagctgtgaagccgttgaatattgccaacaagcaaaacgggaccaagaacgtccccgatggcgttcgcctagccgaagccgctcttacgaagaaggcagagccgcggaaggaggtgcgcatgtcaggcatgtcagagaacgaagtcatggagcggctgaggtctgtcgtatccaaggataacccgaacgagtcttacagcaagcagcgcaagattggtcagggtgcatctggatccgtttatgtggcacgggttaaggaaaccgcacctactggtgttgcccacgagctttaccggacgtatggcccgcgctgccaggtggccatcaagcagatggacctgcgcagtcagcccaggaaggagttgatcgtcaacgaaatcattgtcatgaaggacagccagcacccgaatattgtcaacttccttgactcattcttacaggaatcaagcaatgaactctgggttgtcatggagttcatggagggtggcgcgttgaccgatgtgattgataataacccagtaattactgaaggtcagatcgcgactatttgtttcgaggtatgttttctatccaatgttgttttttatccaattactgacgtttttaccaaaagacttgcaagggtctggcccatctgcacaaccagagcatcattcaccgtgatatcaagagtgacaacgttctcctcgaccgcgttggccatgtcaagatcactgatttcggcttctgtgccaagctcaccgaacacaagagcaagcgcgctaccatggtcggaaccccttactggatggcacccgaggtggtcaagcagaaagagtacggcccgaaggtcgactgctggtcgctgggtatcatggccattgagatgatcgagtcggagcctccttacctaaacgaagagcccctgaaggccctctaccttattgccaccaacggaaccccccgtctgaagaagcccgagaagctcagcaaggagctcaaggctttcctgagcgtctgcctctgcgtcaatgtccacagccgcgcttctgccgacgagctccttgctcatgaattcctgcagactggatgcagcctcgctagtctagctgagctgctccgctggaagaaggctactagctagtaaataactgctcttcacctgcacaacttgaagcaacatctggatcccatttacgcgcgtcctcaatttccattcacgcgcgccttcgatttccattctcacaggaaccactcttcccgtgtgttcttttcccgtcttcttcactgcactctgcattgcagatatcattgcggctctgttctctttacttaccatacaaccctgggcgtggataatctggcgtttgatctgttttttctttttcccctgtccaacttcttttcgatgcttgcacaaacacataccatgtttccccctatgacgttcacgattttgcaacttgcactgtatcatgtgcccttgcacaaaagcgaagaatagtttaaaatccgatgtgactttgacttgatttctttattaaaaagaatcaccgtttacgtgcattgggccctggtgtatgtaaccttgggctctttgtgccgtactcagccagttgtccaaaaggatatcaaacaaatacatgtcttcacataaccttacggggtcaatttcatacatggttcatcgcctatctgactccatatcacgaacaacactaatcgggtacttatgcctctgtccttgacaagacaatggggcttaggataatctaaataccgttgtatcgagattgatatcagagaccactaccataccatttttaatgtcaaatattttattgaagcccgccttgagactaccctcgagttaactgagagaggccgcaaatgcgaccaattatccttggatgtaatatgtcattgacaagcgtaagtaaaacgagtatataaaaattcatatagaagacataaggaacgaaagggaaccaagacctccaatatctcctccatccaaaaaaattcagttcaactcctccctcacaactgtaccgtacaaaccttgctaaacaagactccaacaagatcactctcgtcctcagaagccgtccaacggcccccatccacaagcctctgtttccaaatactctgctcagacgcagacagatcctcccaagcttgcagcatctcctcctcgaactgctcggactcgtccgcagatagagaagcagcagtctcaataatcacactctgctcagcatcttgcccttcaccgcaccgaacgatgacagagatggactgcggagcgagggtttccaggtcagcgggtgcggcaccggcgcggtgaacgcggtccaggatctcgcggagggattcaatctgcgagtctgtgggaccgaaggtcgccactgggatatcggtatcactgccgcttgcgcgcggcgcaagaagtgtatcgaaatatgtcagcttatcccgtgggggtatgacgtattcccttgcgatggctccgcggatgctgtctgggagccattctgtcgcaccgaggacaggcggggtaccgccgcggatctcggcgaaggcaagcattgctacgcagattgcagatattgagaatagtaggatgatgatgctgtatactagttcccagatttcggcggggcctggggtgacgaggacgtagcgtggggtgcgggaggaagttgggaagggggatagtgggaatgtgtgtacgacgactgtgttgcccatgctgacagaggcgagctttatgttctgcgggccgacgtctggggttacggggtgtgccggcgcgatgaaggtggagaaggtgagttttgtcattgagaatgggtgcacgtcgcggagggttgtataggggcggaaagtactgtagccgcggtttggtccgtattccaaggtaaatatagggatggaattgtcgctgccgctggctgcgataaccgtttgttgttggccttgcgggtttgttccgagttggcagatatcgattcctaggccgatcttcactgttcgagggagcttgcgacgtcgtagaattttggacttgctcgatttggcattagggagttgaaggaggacgagctcgctaccaccgcgatttggagcattttggaggagaagcagggttctaggcgagaggaatcgtagcgcgcggaacttgggacgtgctgtgcgggctccactagcgggcagaggaatagtataaatggagcggacctcgggggagctgttagaggagatctcgccaaccatgacgtctgagccggtggtatatgccacaaggaaccggccgtgtgcatcatcggtcttgcccaagtcgtcttcgagcttgacaaagtccaggtcctcggcctcttcattgccgcttaattggatgcggccaatgatatccttctcactgggcgtctctgtgacgcggaagaacacaatctcgccggacggtgccatacccgttgcaacggctccgatccgtgcgtgtttctcagcgccatccttccctttcggccacggcgagagtctcgtcactcgctgatatgtatctgaaggacctggcccattcttccctcggaagagtgatgcttgcgacaaagctatagccttgccgggaataacctcttccttagacttggtgtcctttttcgcctcatccttctcgctgtcttcggcgctttgtgtggtcttccgtggggcctcaaaccggaatgagcgaaggtgctgattgttattctttttctgttgctccacagagctatttataccggccagagcaacaagcgagcccgcctcgtcgctggccagcggggccgcagccagcgaggttaccgagtcttcatcgcgtgataggttcaattcgacgacttcagtgatctcatttcgatgtgacgtgtcaagcagagactgtacataaaacaacgattagcatttgcagagggaggatattctcgaaatggtgaacttgcgatcttgtttccaactccactacgcccctcgccgcctccgccaccgactaggagtcgaccgttgttgcgcgggtcaaagtccgcagcgaagagcggacacgagagtgtcaatttagcggagtatacggtgggcgccattgttgtcgacaaaacagagtgtaaagaggacagatgggatgacggaggtgccccggattcttggcgcggtaacccgggattgccgcgcgaaaactatattgtatagatctacaaagataggactactactctattttagttggtatgggaagaagatgagacgaaaaaaaagtaaatagtattttatcatgcactctaagcattttaagcctcgacttcttgagaagtgaactcgggcaggcgcttgcggatatcctcccatgtctcgtcaccctcaacaagtgacttgacagcctgcaggatgtcatcctcgctggcacggacctgcttggtggtatcgcggtcgcgcagggtgaaggtgttgtcttgaacggactggaaatccacggtaataccgaagggtgtgcccaactcgtcgttgcgagagtaacgcttgccgatactggcggaagagtcatcgacacggttggagacaccggccttgcgcagcttcgaagtcagacgctgggtcagaggcttgaaggaggcgtgggtggagagaggaaccagcaggaccttagtgggggcaactgcgggagggaaagaaaggacctatagagtatcagtaccagcgttcatgtgaaaagaatgcaaaaaggaaggcttacaccacgggtttcgtcaccggcacgggaccagtaggagtgctcaatgatactgtaaagaatacgtccaataccgaaggacggctcgatcacattgggggtgtactcgcggacattctcaacgcgagtgcgcttctcaatcttgatcagatccttttcgatctcaaccttgccagatccaacaccctcaacatcgacctcaatcttgccgtccttctcgaggtcaagagacagcttctcgcgcagctcctgggacagagcctcaacagccgcctcgacagtcttggcgtccttcttgaatcgagggccaaacttcttcttctcaagttcaatctggtactcctcgatacgcagaggctcagcacgggcttggcgcaccacaagaggggcaccggtcttctcccggtggacagtcagatcataagcggagcggtcagcacaaccgacacactcaatccagccgtagctggtcagcaactcggcatcccagcagtcagtagcgtagtgagccatctcattggccatgtgctgacggaagcgcagcttggtagggtcaacacccagcttcaacaggaaggactgaatgcgggccaagaaatagcccaaagtctcgttgtcgaccaggccagtttcaacagccttgccgatggtcattttggttagctttgtgcttccggacagctgcacgttacggtcaagcaaggtcagctcagtatccttgacctcatcgaagcgagcgtgcttcttgccaccctctgggtcgacgtagtgctcaatctcggccatgaggaactcgcgcacacgcaggagaccggcgcggggagagatctcgttacggaaggacttgccaatggaggcagaggcgaacggcatcgactgctggttgaactccaggagcttggcgaagttcaggaattgaccctgggcggtctcaggacgcaggtaaccgggcatgttggcgctagggccaatagtggtctggaacatgaggttgaaggagactggaggcaacacctcgccgccggtgacggggttgcgaatgtcgtgcttcttgatgagctgctccagctcggggccaccgtagttgtcaatttgtgcgagggtctcctcgtactccttgaccagagcatcatccagcttcttagcctcggtgcccttggcctttctcttcttcttggcctccttctcctcgtccaccacaactttctcgccgcgcgcctgtttgtctcccttgaggcgggcctcgagcacctcctcaaccaagtggtcagcacggaagatctcgccagtcttagggtccttgcacatccagtcggcgaacttgtccacgtgcccactggtcttgagaatctcgtggggggtcaacatggtggtgtcgacctcgagcatgtcctcctcgagcacgaagtgcttgcgccacaagtcggtcatgttggcgatcaaggcggttccaggtgggccatagtcatacagaccagatacaccaccgtaaatttcgaaggagggggtgtagaacatgcgacggcggagcatggagtccagcaccgtgcggtcgatagactggccggtcttggtgttgacggtggccatcttgacgtttcgtttcaagctcttcgggggaggggtgtaattcctgaactgagtccgaatgagagacggaggggaaagaaaagagcggggtggaaatcgcaggcgcggcaattgagtcatccactacgcaccagggcaaccctcaggcaccaccgagaggacaaaagacaaggagtatagaacgagacagaacgaccaattgggtcggtctttttctttttctttttatttattttccttctaaaaaggaggtctccggggtcgaatcgcagattatcgctccggggaaacgattgtccgaaataatttatttctcgacgatctttacattttccattgccttcaacagcagcactttaccctctcagctttcaaaaatgggtgtccctggccgatctggaccgcctccgggcgttatgggagatattaaaaccggcaacaagctgcgccggaagatgaaccatgtcaagcgcaagagagccaaagatgctgcgcgccgagaagagcgctacgctttcaagaaagaagaagccaagaacccccagttgaaggaagagcgacttcgccgcaacattcctctgactctcgagcggaaacgtgtctggaacgaagccgacaacgacaccgaagaaactggtctgggattgagcattgacgttgagcgcatcaagcgcgccaagaaagaagaagaagacgagctcaatcggccattggaagagggcgaggatgacagcgaggctccggaatcagacgctgagtcggtcgacagtatgctggagtcagacaacgaagaagatgaagatgaagatgaggacgaagaaaagggcgaagacaaagatggcagccgcggccggaagaaggcctctatccgaactgcgacagagcgtgccacaagtcctacgcagtcaacacgcagcacaaacctcagcctcgctcctgaagcattggccgccaaattccctacacttttcaccgagggacctccacccaccccgaaaatccttatcactaccggcctcaactccaccctccacgaccaagccgaaaccctgaccgagatgttcccgaacagcgtgtatatccggcgtaatgcccaccggtactcgcacaaattctcagtccgtgagatttccaaattcgcggcaaaccgtaatttcaccacagtcatcgtgttgaatgaagaccagaagctaccctctgggctaacgatggtgcatttgccagtcggcccgactttccacttcaccatcagcaactggatcgacggaaagcggcttccaggacacggccgagccaccgagcactggcccgagctgatcctcaataacttccgtactcctctgggtcttctgactgcccatttgttccgcacacttttcccgccccagccggatttcgaaggccgacaggttgtcactttgcataaccagcgtgattacattttcgtccgtcgtcaccgctacgtcttccgtgagaagcgtgagactgagaaggctgtcgtcggtgctgacggcaaggaaatggtgggtgctgagggtatccgtaccggtctacaggaactaggacctcgcttcaccttgaagctgcgtcgtgttgataagggcatccagcgtgccagtggccaggaatgggaatggaagggtggaatggagaagacgagaactctgttccaactgtaaatgtctctttatgttgttattcggttttgcatggggttcgagggagttatatccaaaagcttgtctggtttcattgcaatggactaaatttacttataaaccaccatgaactttatactctgaaggtcataagaggccacgtcggctctggattggttacttgcacaaatacattcattggctatccatacccaactccctaaaagtacgaagatggccaataatattttgtcacatgacatggcgttgctaacatctttgattcattcaagttgtccatccaagtgaccaacgagatgcattcgatggattcgaacattgacctacccaccgttgcggagattgaggcttcgactgatatcctcagtatacgaaccaattccattaaagtggttcgactgcgagaacgcttcgcggtcaagattggatacgcgattccgcctgtagaggcagagaacataaaatttgtcgcggccaacagcatggtttccgtgccaaaggtctatgccaactttgtcgatccagagaaccagaagagatatatcattatggatttcatccctggggccggcttgcaaaaactacacccgtcgctcatcccagccgagaagacggttagcaagcggatcaaagagaccttcgacgaattacgagcaataccatcaccggttggaaacttgaatggcatgccttacctcgacggtgttttggcaacgccagataacaacccagtgatttctgggccattcacaaatcaagaacagatgaatcagggaatattgaaaaggctgggccaaacgcaatcaccgcaccacactcgcttagtgcaaggaatggccgaccgaaccctcaaggaccatcgaattgtttttacccatggagatctgcagcggaagaacgtaatggtggagcgaacggtcaacaataatggagatgcagacttcaaagtgactcttattgactggaatttgtcgggctggtatcccgagttttgggatttctgcaattcgacaatatattgtcaacggaaaccagattgggttgagctcattccagacatatttgatcagtacccgttggaatatctcatgatgcaacttgtctactcgatggtcttttactgatgaacttaaattgcatcaaataacaaatcaagtcttgatcgtcaaaatagagtccgaggaactatataaacatccactgatggagataaacaattccttatccccgatatcagccaaccttggaagtcacgagacgatctcctgcaactgagccaatgacaatagaaaaaaaaaaaaagaatactaaacaaagtacatcatacccaaacaccctccctccctagaaatatggatatcctcccccggcgcctcatcttcatagcctcaataggcaatccaaagccctactacaacacccgccacagcgccggacacctcctcctcgatgccctaaaacccctcctcgaagtcaccctcccaaacacaggcctctaccacgaaacatggcaaagcccaacacaaatgaacataacaggcccgaaactcgtgcgccgactagaacaatgggcaagcgagcgcgccagccgacttgaacgaatcgccagcgttgccgcaacacgtgcctcgtcgtcttcgtcttcaacaaccccaaccccaaacaacctccccgcacaaaccacctacccaacaaccctcatcatcctccacgatgagctctccatcgccatgggcaaggtccgcatcatacgcggcgggcctgaggagtttagtctgcgcggccatcgcgggctcgtcagtatctgtgagacgctgcgcaagaaggggttgtatccccgctcgtcgggtgcgaaaaagacgggcaccgggccgttggcggatctctccatcttgcgcgttggcattggtattggtcgtccgtcgtcacatgatacgggtgctgtttcggactatgtgcttgcgactgttaccgataaggagcttaaggcttatcaggccgctgcgatgccggtggtggggactattcgggatgagtttttcagacctgcagggaaggtctgatgtgccaatgtgcagagtgcttatggcccctcatgattggttatatgcgcagcgaaggcatggaagtgaagaaagtaatgaagagcaatgtcaaagttggctcgtggatgtattaaccatatacatagaaaacgcctggttgaaaacaggagatagctgccgatgttttatcgacaaaagcaaagaaaaaaaaagacgccagtctgtggcgcagatctcagcgcagcaaatgaacatccggtattatgctaatagagtagtcgattcaaagaacaactcaaacggttccagctatgctcaaatcgcgaatctcctgcaacacctcctcgacccggttatccagatcacccttggcatactggtcacgagtctcggcatcgagatactgctgcacctgcgccatgcgggaataagcctcggcacagaagcgcagctggatcttgacgagagcttcgaagctggggtcgaggtagggcacacggaggtcgataagctgggggagttcgttgaagagctgctcattcagctgctcgtaggcctgcttggccatctcggcttcgcgctcggtccgcggcagtttggtgacatccttgtctggcttctcggctagcttcttgaccttggcgcgcatggcgtcgtaatccagtagcttgtggttgcgtttcttgatgcattcgttcacgtcggggaagtaggcgcagaatcgggagatggggtcgaggacggtggtactgtggattttgtcagcaccattcatgtgtgctcgttgatgttagtgaaaggatctcttaccggtatggtccatccagtgccttaatggtctcggcatcaagatcctcaacggcttgcttgtagctccggctcacaccgtcttttgttcccgcatcgccatagaaggcatcaatagtctccgcaatgcgcatttgggacgccgtcatggctaggaaaagtcagccttgaacaagcagatctaacaatccgcagagcaaagggcacccacctcgtagtgaatcaagatacccctttgcctccttctgcaaccgattggcagcagtctccatagtccggtaacgactacaacgagcaacgtcagttccattccagtcccagtataaccatccacagatagcagcaatgacaaccataccgttcctcgatctcataatcgcgatcattcgtcctctcgacatgtcctatacaaccaccaagtcaacacaccattcgcatccacgtgggcgcggcaagtaaatcgtagcgcgtagcgggtatctcaatccgggatcgccctcatctcgattcattgcggggtagaactcgaacaaaactcacccgtcttcatcatcacctgtgtcgtcgcacggttgacatttttcttgaaccctatccatccacacggttagattcgctcacacaggcaccggttcatgagtccgagatgttgtaggataagaggcgtacctgcccaagacatggtggcggtgttagttcggaggatccggagatgaagatcggctttgagttgagtgtgggttataggctgtcagtgggtatgaaatagaagcaagtcgtatatgatggcagttggctgcagtcgagaagaatctccgatgttgaactgtagggaaagtcgtgaaggtcctggacccaatgccaaggtagccaacttggtctgccttacggatgtggctgtgtgtggctgagtgctgatgattatgtcatatcgtccggatgcggacacgtcatgtttggtagggctggagttcgacggagtatccaccagcgttgcaattcaggttctgctaggatctgtagtatctctgtttttttgcagaagatccacgactggtaatacgcggtatatcgtgccaaggtatggatcgaaatattgtatagttaactataggtagtatcgagttgtgacattcctactcagatcgtgtgcatatagccgcttacgctagtaggcgagcattcaagagggagataataataaaacccattttagcataattaccccttaccccttaaacagcgccatagttagtgtaaggctgggtcttgcatccgcgacaatacgcctgcatggcatgtgcatatcgaggtattcctcttatccacttcgtccacttcgcctacgccgtaatgctgatgcctaagtaactgagttatgtgttagttcttggcggacagctgtatgacaatgccaagctcgaacaaatgcattttccgtctgctcgagattttactcgaaatccattttttgggttggttgcttggattgggtatctgggtgaaggaagtcgcatagtccgaatccacctctttagctgcatgtgttgtatattaccgagttccatacggagtaactactccgtacagacccaaggtatgtggataattagaagttataaatgcatgtgtgaataaataatcaaaggttggacggagtacatagaaaaaagtacggagtagtttcaagtctttctctgccgtctaccttgaaaacttagaagttagcaggtagaggatatctataaaacaaatccatactatatcgagccaactggattggtcgtgctcaatggcagaggcggtaaacgcggccaactattctcgtgtgattaactagttagactgcgctagtctacaatatgacacactcgattgcatcagaccgctgggccttcttgtttctcgctagcgtatggaggatgcatgggctattatcgttgatcggaaaaaacctccaggttgaatgatatcactggccctggtgtgttggaaagataccggagctaatctactgcgctgtgcggatcgcctcggtgacacttgtggaccttgcatcgggtcgataaggcgccgatcttcgagttgatgtcataggtttttgtagattgtgaaactcggaggttgagtagagatgcgttttagttgtaagaggggaaataggaccttgaaacgaacctggtatgggataatcgatgtgcaccttgctacgtagaagcaagtcacatataacgggaattcaaaatgcctaagccatatatacaaaaagcgtcgataatatgtactagaaatcgacgtcgaaatgagacgaaaagccaaagcaaaaaggtccagatgacctccagtataggacatcccacttgggtgccgattcctgttcctgatgctgtttcagcagagcctctgcctacaatcatataaacaccagaatccaggatcaacaacccaggtcagaatatacccatcgcccgctaaggctgggttcgtcatagtggtacaagggaagaaagattcaaatgggaatttcccgccaacgccgtagaaactcgaaggtacctgccaaaaaccccgtaacgcgaaaaaaagaccggagatgaaactccgaaagactgtaaaggaaaccggatcaaaagaaaagggtcatgattcttcgttgcattgacgttgaagacatgaggatccagacaagaagacaagctaaaatgtggatcgatgtaatagaggacaggctgaagaggctggagggatacactgtgaatgcgccggagccaaacaggataaaagaaaagaaaggcaaaaaaaaaaaccttcgttaggggcctccttctagtttaggagcattcaaaggattaaaaatcagtaagcctctccttgaatgggtctataataaataaccgccctgtgatgcaaatggaaaataatagtttcggacacatcaaaccttacggtgcgggcctgtgacctcgacacctgacaactgtcgtgttgaaacgatcaaaacccttcctcgccggccttacacagcttgatctggcgcacccattcggatttgaggacctgtgaggcattgatgcggcgagaaggattgggatcaaggatggagtagatcacgttgcgacaacgagcctgagaatttataagtctttgccccggggccgcaggagggggattagctgttcttactcgatgtaacgtctcaatcggagcgtatccatcttcatgtttacgaccgtcaaggtaccgctggtagaactcgtcttcatccttgcgtgccacacgccaaagatgccgcccggtgcgcatggccatgtagatcactccagtcgcccagagatcaaccgctcggggatcgaattctttctcgacgtattcctctggggcaatatagggggcggagccgcagagtccggcggtcatatgggcttccttctcccaggccatacggaagcattcaccattaccaaaatcggtgatcttgagtgctccgtgagtggtcaaaagcaaattttcgggcttgaggtcgcggtgtgcgacacccatttcatgcatatactcgacaccgcgcatcaactgcttaaaaaagcagtcggcttcggcgacttctaatttgccggcagcaaggaccaaggtgtacaggtcgccaccagcgcagtactccatgacttcacagtaatctcccttggcatcttgcaagaggtccaaagtgtgaatgacgttcgggtgacgaagggaagatgagatgcaaaattccgaagtcagacgtttttgatacttcttggtcgtttcttgcggccggcggcggaactccttgacagcatacagctgttcacatttggaatcttgggggtcgaccttgtgcgagatgcgcacgataccgaaggcaccgcggccgacaatctcctggcacttgccgtacttgtcaaccagagacgcggtggcgttcgggccacccttcttatcggcagccagcttatcgcgctccgtcttgaactgatcaatccaagtcgacatcagcgacagctgttgctcatcggcctggtcatcctttttccggctaccacccatcatatctcgcaatagatcggtgagcttctcttgccgtctagcacttctgaggttgtgtacatggttgccgagagcttccgacacaacctcaaatcgcttgttgactaaagctccatcttttgtctttttctcatccattttcttcctgtccttttccacgggctcgctcttgagcgagggatttcgtgatggtgttcgggaattttctcctcttgatggaggtctagaaggcggtccggaggcgggttgagacggtggtttcgaggtcttgccgttgataggctggatactttccacgctactgtcggatagttcccgcggcacgtcgttattctctttacttgctgtgtgtttcgctgtggttgagaacatgcgagtgaggcgagcggccatagtagctttagtcggcttgccggcggaagataatgccggagcagggagagcgtccccgtttgcgtgggcagccagattcatgcccgccagggcgcgtgctaccgaagcatctccatccggagggtcatgcgaatgttgtgaggctgcggcggaagagactgcggaaggcacaggtgaaggggaaggtggagtcatgtgcggtggatcgacaagtgaagattggaataatggggggtggacacaagaattctccggccccaggatggaagacgagcttctacagcgcgcacgaagctgcggcgaatcgaagttgtcttaaaggtaaggatagagagaagtaagaggaggcgaggcgagagaaaaaaaagtaggtggcctaagatggatggcctgaggcaacaagggcaaaaggtgacgacacaaagagacacggcaaatattggaagtaccacacaccagaatgatgcccgctggcaacgaggagcccctagggtatatagacaagcaataaaagaggagagagaaaagaaaaattaaaaagaaagagaagcaagtgggaaataagtgggataaatttggcgatgctagagaacttgaaatacgacggggttctttttggtatggtaatatattacatagttaaacccataaaaaattgtaaaattcaaatgaaattgaaatataaaaagtgaaataactcgacaactccaagagaagggggaaaatgtgggcactgcaacggtataggttaccctcgaggattattaatgcttgcaaatacttcgttatggtcttgacctatagggctacatagtgcatcctgcatacggtgactccggcgctgtgagacctaaccggtaaagtcgagccatctagagacatctagatacatctaggctataacatatttcgagatatattttagttgcacacacattctttaatagtggcgtacattttcatagaggaaaggattcccgaggtccgttccgaggctttagtactgatttcttttggtgagagatttaatggtaatgaaaccgcgaagtaatccaaagtaattaaagtaattagtataataaagtcgagtaacgaaagtacaggtttttttttttcaagactggaactgggtctctgccgcgttgagaagcttgatacatgtacggagtatcatattattttctcttcactggtattaatgacgttgggtaaggtgacgtcctcctgtatatgtgcactcattcgctattcaacggacactgctatcgctactacaatttacaacgttggaaatacagaggggaagtagctttgatagttccgccaccacaccaaaggactgaggctgtgcagtctgcacaacgaagcccagtcatgattcgatcaggccccgcaccaagccgacacgctgggtgcacttgtggcggttgtggttatcccgaggccctgtggacttccgatgtatgaggtatccatttagatccattcatccgatctaattggggggatactgttgatctattagccggagcatacaatgggaatattttagacgtgctttcttactgtatatggtaggtgggggattatcatttgaaagttgtacttagggcatagctgtatgtgatggaagaccatcctcttacttgacgaggtactacaatacaaattcacactgtatgtaaatcgaatccaggtaaccccagttctcaaaggacactgtcctcgttggctgtaaatcctaaatcccctgtcaaccaattgtcagatccctccgtttatacccgtgctcactcgcttctttcattgtccagctggtcaactcgatcattccgaaagcaaaacaccccatttctggaccctacttcctgccagtgatggctacgcgatcgctgctacgtaataataatagtcggtcaatcatgcactcctcttcatcggggcgaggaaaccgcgtgggtctctgtgcgatggagaccccccgcagcgatgtacaatgtacataatgctctagtacgttataggggaatacaatagagactaaagtagctttccgctatctagcgtcattcggacaaatgatggcatttgggatgggcctcggggtggtacaggttgaccaatgtccatgttcgactgtttcaatttgaaacgaatagaatacaatatatcgcctttcttagccctatgacttctgcacgggaatatgtccagccttattactttggaatgtggaatgcggaatgttcaccgtctcttcggatccctggtgtgtccgtgtgggggcaattcttgacagtgtcttggatttccatactagcatgagcttcgcactgaactcgggcttggtttcggagctagtacggggtggtaactagcggtatactcaataatgttattcaatggctggttttaccccggattactggcgatttccgaataagccccttagtgctgacctcggcacgggacacaggaagaagaatcgagtcagacgttctgctgcagaggagcaatcaagtgaaaatgaccgtttcaatctcatacgtaacgaaaaaaacagcatttccactttctcacacaagcttccgtatccagcactaaccactacgaggcattttcacccaatcacagccctaggaacccatctcaatttcccacagcacaaagttactagttatgcatcgtcgacgtacaacggacaatatacagtactaagccttctatatcaatattatatgcagctacagatgtacttctataaacaagcctttcactactacccctcttcatttcaaagcggatgactatttattctatgatgctcttgctttcatctcttttagggtttcccctcacctcgcaaagcattcccctggttagatcttggtgccaatatcgagaacaaagggcaagccgagcaagatgaattcaacaaataagattcaagcccaccacgggttgaacatatttctatcgttcatagaaatcgtttcatattaaaattgctcccaagtacgccatatctctgaagtccaatcacttttgatagccagctaacagaattcagaagtgcaaatcagccttattattacctagccctggacagctatcctgatgtatgagtcgcatacaatcccagtgtcgcatccgagcagcttaccagggacagagagcttaccctgaattattcgaaggcaagaatcggcaatacaatgggcctctcttcactggaactgctagagcagcgtcttaccgcaccggaaggacagtttctctatttccgtcggccaatccttgatgagtggtcaggtaatccgagaagtctgagtgaagtccaggagagaaataccgtagcacgcggtaatatcactatggacatccgagccatcgcggatatgattcaagaagacccattcagagcttagaaatgggaaacatcgtttgcgcatttctacgatatcacatacattgaggctaaagacaacccctctctacaccaaagtccccgccttcggcgattgttccatctaaatgcgaatgttcaatctttacgccggtttactcaacctcgagatagcaacttccagagtttacttgctagtctctacaaacattggatttcagagtggaaagcggacaactccattgagcctctggacgctatcatggcatacctgactgacgtcgacgcaaaagccatttgagatggctggctatcaatagattgacaggagggcttatcattattggggcgtatggcgtcgcccgagactgcggcgctgctatcttgcaaaatgtcagatgatatgccattatgaacctgacacaatagatacaaacttgattgctaggatttagcgctcaaattcatatgaagtgctagtcattcgctcgctgtcctctaccgcatcctcgcgtccagttactataacgccacaacactaactcgctcacccggaacgaacccgtagttaagacgccaagaagatcaaaagggtgcataccattaaggttatatgcgatgaaagcaaaatccaaaggcctctcccgtgacccctggtctacaccaatgcaagccataatccgctatccaatccctgggttcccattatacatatatatgatggcagaggccgggcctcctacagtacacaaagttcaaccctgcaccgaagtatccagggtatccgtatacgaacctttgaacgcggtggatcctaaacaaaagagaacaacctacgtcgcggcatacgtggatggcagatacttggcaaagcgaagatcccgaggatcacatctatccgataaaacccctgttcattcgaggcaggggtccgcgtccacgggtcggttcacatgttgagctaagtgcaaaaaaaagaacaaccacaaagccacccaacaccggccgcaacgcaaattccgattcaagccggtgcatgcttgaccgccagtctgtggtcgcaggaaagacacacacccagcctcgaacctataggattggtcggctttgcaccgcgacacctcacctatctcgcgttgctaaatggtcaaagctcgagataagctgttggcattatattgtttttatcctgcgtgcgtgcgtgtatgtggcctatgggtatgcactagtaactgcactacttacatttctatatatgcgctgcgctacgctacggagcagcagagctcgggtgaaaggggcggagcttgtctttgtgtttgcagctcttatcccgctgtggatgtacgttgtgctaaacctgtctgtgtggacgtctgtgctttggccaagtcatgcaggatgcaggatgtggacgatctgacctggagctgggagctgtctgtgggtatctgggttttcttttccgttgcgatatgcattgagctttgctttttcttggtgcggtgggtggaaaaagcaattgcgagatccaattagtgtcgtatgatctatcttcgaacttgattctcgaggctgcacctatccgctggtcagctcctccatgcagaagcagacgcacgagccacgttgggccggttgggaaagctggctcttggcggtgctgcttggctatagctgttcggattaagagtatgcctagcgctctagacccggatctaatttggactttttttatggcgttgttgtggctgcgggatttctttgatttatacgacctataccccgggtttattataaacaggcattttaatgaccggaaacttgtagtgagacaattcacatggatattgcgtaatatcagcagtaatccattcttccgactgtccccgaacaccagtaacaaatagctctgttcggcattcctagttcataacacttgatatgcgaagccgagctatctgcgggccgcccccgggccaactccgcactgtcatttccctagcgtacagcgtactagcggcgctggagatgccacgtgggaaggaaaccggtctcattgaatggcagtcacacatgaaaaagcggtatgcataaccctgtcgtgcttggcttcggtgctgtgttccggtaatctcatttctcgccaacgtgctgttgcatgcaggtatccgtatcacagtatccttgacaacgggcgagtccgctgcggtgtgtgccagctatgccgctctcacgccttcgagataccggattcgtatatgctaacctcgaaagtaccagcggtgagattctgtcgcatttcccttccttcacttagactttcgcgcgaactggcccccagatttcacgaggcatgcacagttcgatatcatgacagaactcgagtctgctaccagatcagaacacacaagtcaacaacaaaggcagcatgccagaactaaaatgtacgtaccacaaactgctccaatgattcctcgaataactcgttgttcacgcccacaccgccgggatgctcggtcggagaaagaggattcttaaccactaaacagaccgaaatatgtcagcactatccaaacctgccaaacgagatccataagccacacaaaccgtattccacaaacagattgatatagatctgttgcagcgcgatgcgcatgctaggactcttgaggtccgtcagcatgacaaacttggtattcgtcggtgtctcgtagtagtgaagcttgtattggctggtggtaaatgacacaaagctagttgcggtaagcatcgggtttgtccgtccgtctaaaagccagcaccccgtctggcttgcttcaggggcagtcttacttgtcttcttcaccccctagcttgcgcaccatattccgcaacgagaataccgtgccgaaaaccagcttcgaatcatcgtctgtcgagcgcactgtctggccgagaccggtcggcggtgcgtcggtgactgtgttagaccgggacttccccacgatggaggtcgggcgtggaagccagcgacgcttgtagatgcattccgctgaatcgcagttagtatatgaagatgaattcattatataaagcgtgtttaccatgccgatcaaagatgtagaacgagtagacgaccattgtgtattgtgtgacctgaaacaagttgttgttgatgttcaagggagttccaaggctgacaggcggtgaaatcccctatcgataacaaaagcccatatcaaaaaggagcagcctaggatttcttcggcgtttgcgattcgaccgggtctttctctaatttgacttccgtacatagggtttagtatcatttattctattcgcttctgtccaatccccgcaaagagggtctcgtaaggctgacctttcgcttcctacgtcgaatcccccgctcgaacttcctcattaccccacacgtctcctaccagtgcttgatgataagtttatttcaatggacgaaaatcaggcaatggcaacccctatgtcggatatctccgcagagccctctaccatctcactggagggggtgaacgatgcgcgcccccaggcgagcagagttgggtgagtttgactatgaaacaaccgcggaagattcattttcgctgacgccattctgcaactaggtcttctgcatcctatgatagcactgggaggcaccgacgacgaaacccaagagcaaggcgtccggtgaaggtcagtctctcaatgccgttatgacagcttcggagaactgataccgcggactaggaaacactggacgcccgctccgagtattacacgagccaagacgacggtactgcggaacatcgcatcaaccaatacgtgatcaaacaggagatcggacgtggatcgtttggggctgtccatctggctgcagatcagtttggcaatgaatacgtatgagcacgaacttgcgggatatgctgggaagtggacatgctaactgtgagataaactgtctgtaaatttaggcagtcaaagaattctccaagtctagactaaggaaacgtgcgcagtcgcatctgctgcgaagaccgcgaggtccgattcgaccagggacggagttcaactcgccattacatcgacatccttccggtgacgataaggagctcggagagaatcctttatatctgatcaaggaggaaattgctatcatgaagaaactgcaccacaacaatctggtgtcattgatcgaagtcttggacgatccgacagaggactcgttgtatatggtgatggaaatgtgcaagaagggtgtcgtcatgaaggtcgggctggaagagagagcagacccatacgacgatgagcaatgtcgatgttggttccgtgatctgatcttgggaatcgagtatctgcattcgcagggcattgtccatcgagatataaaaccagacaactgtctggtcaccaacgacgatatgctgaaagtggttgactttggtgtatccgagatgtttgaaaaagattcaaacatgttcactggcaagtcagctgggtcaccagcatttctcccaccagagctgtgcgtggtcaaacatggcgatgtatccggacgggcgacggatatctggtcgatgggagtaacgctatattgtctgcgatatggaaagctgccatttgagaagcagagcatcttcgagctgtatgatagtatcaggggagatcccgtggactacgaagaagaatcagatgaagaattcaaagatctgatgcaacggattctcgagaaagatccagagaagcggatcgacatgtttggtttacgagtgagtcaatcgcaattgcactgcttgcccatgctgaccagattcaacaggagcatccctgggtaacgaaggatgggacggatcctttgctgtcatttgaagagaacacatcgcagcccatcgagccaccgacagaggaggaaatgaactcggctattacaacaaacatgggaaatcttatgaccgtggtatgttatattcctcgttcgatagtatatccattaacaaggcccaggtgaaagcggtcaaaagattcaagcgactaacagatccgaccaaaccacaatcccccattgaaagtacgttcggtaagagcattctaggcggcgatcacgatgcctactttgtcgagccaccaatggaaatggacccagacgaacccttcccggccgtgggagcggctccacaaacacatgatggccatgacttcagtgcaggagtacgcaaatacttcggccggcgaccttttgccggactccgagacgattccggaggtttcgggtctagcgattcggccagtttttcatcccggccggagtacagcccgaacagcagcaaaagacccagcggcgtgttcgagcccgagcgaaaagactccggctcgatccgcagttggggatcggctcaaccggatatcggtcacgaagccctgccccactctcaatcgggatcaccccatatccctctttcgcgagcaagctcgggtagaactaagcgcagcttagaggggacgagagggcatgcccgtgacccacttgaggaggaatttccctacctcttcattgggccatctacatacaccggctcctcgcagccggaagcggttggtacggaaattagtggcgatccggggtccattctccaaacgttggaacattcaatggatcattctgaccagatggaggacgatgagccggtacagttcgtcagtgaatcgcccggcgctgccgatttcaatatctacgaaacagcatacaggaaggaactagatcgcataaagcacaacctgaaagaccgcgacaccggcccgaaggtgtacctgactcgcgtcattgagaaaaacagcgacgaagtggtgaaactggccaaagagaaggagttggatcttcaaactgggaacgaatttactcctttttctctgccgagaacatccctaggcttcgggcatgccgttaacgcggtacgctcgcagatgctgcagaaaagacaggccggggagttggaggagcagggtggggagggaagtaaagatagaggttcctcgcagaaccgcgagcttcaccctcatcctccgaaacgtctgtccgtctcatcccaggctctacttaagcctgagccgtcttcgctcgaggcgacaggtgtgtcgtctactgaggggaaagattccaaggcccagctgcggcggattcttgatcgggttcgtgggaagtctgatggtgcagagtgataggaggtgttgtttggatagaattgtgtgaagcttgggttctttgtatcgagatagcgttatattcaaggcatatgcactgccttcagcatacacatggcaaacttttttgaaaggagcattttcgtgaattctcgttagaatgtgtgtgagagcggcgaccatggcgggcaccatcacgaagtatggcctgtgaaactctataaaatacagaaagcgcggttctagactccaaggccccgataataaaaaaataaaaaagtcatcgccagtatgcgatccggcaacttgagatcaaacggcactcaagctgaggatggatggacggggatccatagtggcattgcgccaacgtcgccaacgacaccgctaggccagatgtccgtccatccattcatacatagtgtgcagtgtaatctagcatacgtagtggactgatacactgtatgagtctgaggctgagagtaagtaccgctttccattatacgaacacctgcgtatctttctctcggttctgttaaccagaactttgatgcaaaatattaggaatacgatggtgtaaagatccagtttcgaaatgcgcctacattagcaaaagccatgtttaacttacaaggaataaagaatgaagaacgagaacaaaaggatatatgtgtgatattaaatactctgaattcattatagactaggacaaagagtgtaagacatcatcctataaggagagtcgagatagaagggaataaacaaaaaagccaaaggccaaatccaaaacagggagccaaaacatcatcaaaatatcaaaatcagaagtaggataaaatacaggttaaacatgccttaagcagaaaaattggaaggctcaaagaaccgccatcgccatgtagtagcaatagacataatgcatcatcatcgtcatcaaatgcatagcacgctagacattgggctgggctggagggagaaagaaaaagcagagagcagaaaacagaaggtataacatcgagatagaagataaaaagaaagatgctaggcatggagggcatcaattggcgtaaacgtcttgtattgtcttaggtcgtggggcttggggtaggcttcacaatattgagaatgtgtgcctaggagacgaatggagagcgggagtagaaggaaagcagtggaagtctcgcttgcttgaactggggacgcaatggtgtgaagattcaatcataggaaatcgaatatcaataatatgaaagcattatcttcatcgaacgtggggaactcgtggacgcatcgatggatgtatgaaggtcactgtcaaggggagaagggaaagagaagcatttctcgtcttgtggtctatctgaccttaggtagattgtacctaggttggcagacacatgggcaaaatgagagagtgatgaattgtcgaagggagaaagtcggaggtgttgaaagaagtcgcttgaagagcttggagaaaaaccgcgcacaataaacacaacacgagaacgctgtctattgttcatcaatggctttatcattcattcatagcccttgggcctcaaaaaacaaaggctgaaatcgaaagtcgaaaataacccagactgggatcgaagtaaaaatgagaatgaaaatgaaaatgacgatagaaaaagtatcaaaatcaaatggtcatcgtggaggtttctcggcttgagttgtattcgttcgttccgagtatggtgctggctggtcaggccgagtgagcgaatcgcgccgactactgtctgacggggagaaccggtctgctgcaaagctgtagggccgctcggctgggttgctgaatctagggaaggcgtctggagggcctagttgtaaggcatgtggtgaagggaggggatggaccatctctgtgggccggggtagttcacgcatgttgatattcatgcggggtggcatatcgcggcgctcgtcatttggcgcgggaccggggccaggtggtaggactgctgagtgcatggttggagtgtcgtagagagttggggctgggcttggcttgggtccgtgaaatgcttggggtgccggcgggaatggtgtagacgatgggcctgccgcggggctggtcggtgaagaagggactttgagtctgcgagaccaccctgaccgtcggggggctgggtaagtttcaccacgggcctcggctaggagctttcgtcgctcggtctctgctttgcttgggcgtcctcgtttacggggtggttcgccgggggcgacatctagtctcggggagagctgggctgatgcgccgctttcgctgctgtaagaggcggtgctggctggtggccttggttggattgcacgagggattggcttgtcggaaggatgcaatggccgcttgcgcatggtgctagggtccattggggctggtgggccggtcatatcggatggtggtgggaatgaagccactggctgtgttggagggtgcacgggctgctgaaccatattgagataggccgttttgcacgagctgagtgaacgaccttgaccggggcaggtgttagcgccatgttgatattgatcaagctatccttccctttctttttctttggccggcaattggacgataataccttgaggaaggggaatatgctcccagttgggagtaatcccatattctttgatcatccgtactagatagctggaaggaaatcccgctttcttgaggatctcggtgagtagagtgcactagttcttggtcagcatcacattcacatcggctaaagaatgcccataccttgtcctcctcggtccatggcctatcggatagattcgacatatccagaccatggaagcggattatagccggcttccctttcccctgaaaagaaaagaaatataacgtgaaagaaagtaagaaagaaaaacaaaaacaaagaaagcctcccagatgatcccggaaacaggacagcgaacggcgtcaaggtcgtgatacacaattcagatcaattgatctctcatatatgttcgagaggaaaagcgaagagagcgagagagaaagaattaaaaaagaaaaaaattcaatcaaaagacacgcgccagagaacgagagggtgtcttatgtccccatatccttccacgcggagacgaaacaaaagggatgacaagagggaaacgaatgatctgacaattgaaggctttgtagccaaagaaaatgaaaaaagagcagccaaaccaaactccatgcaaaatccccaatttatttttttttctgggattttttccaggaagaatttctagccaaacggacttgagcagccgggatcgcgcaggagaccagcgttcgggagggaagctgcagggacgatgctttctggagagtgttacagtacaggttagaagaatctggtaaagtatataccacaggtgaatagaaatgggggtgtttcagccgggccaagtttcatattgttttccagaagagtttcgaagaacgtgaaaaaggcaaaattaccactaagaagaccgggaagcggggagattggatttctgattcctccgaaagtacaatcgaggggttgaatggagtgggggctgcattgtatcgaacagatgaggtcttctgcatagggttgtatgggctgggaatgcccaggcaatataatgtataagataggcttagatctcgccgaattgcatcgttggttcgggaaacggttggccctggcagttccagaaccaagggacagtttgacgaagcgttatattttctttttttgggggcaattttagtgcatgattttggtttcgtcgggtcttctccagcaaagagtggaatcatggagccgagaatgggatttgataggtgccaacatgggcccgggacattgggacgccccaagaaaatgcagaaaatgcagtgaaaaatgattttgtttgaagctagcctcaggggcggttagagtgggcgatcgtacagagaaaaaaagcgcgtctgtcatgcagcgggttctgatgaaaatggggccagaacgattggcagagatgagccgagtggagaggcggactccgccgagatgcagccatgaggttcttggtaaaatacaggtaattgattaggggggaatggtgaagatggtggagatgaagaagatgaagaagaggagagaggatgaagaagcacgggattatatagaaggacagcctgaggcagggagccctacaatatcacatttgatatcacatcggtatcccatgcgtattgtgcctggtattatcaggaacagtatcatgatacagcgtatctgatgtgtaatccccgtaatctatgtcatccatatactaaaccagtttgaaacgcacagacttccacgttgacgaacaacacacatgcagacgcgccttttcctgctttctcctccaatcgatttcataactttcacgcttttggattttcttacatttccccttgtctggtctttcttcgtttccatctatatcactttaggcttatgctgaccttgaacaaccctgtcacagttcccgtgtggaaatcaccacataaatgttaaaccacaattgggattgaggaatgactatggtcactctcccactactctaccagaattggtccatgcctattccaggtatgctctttatgagcctgagtgggaagtgaaatcaagaccactataccataccacctatacaacatacaaccaccactggtgaaccgagatgattcaggtctatacaagacagtgagagtaggctcaaggcggtgagacaccgaaaatgacaatagcttcgatttcagtcaaattaggagatttttatcaatgagattgtttcttaccttgaccgctctggaacccccttgattcccgagggcatatcctggcagaatcgtccccgaacttcgtattctgctttattttcttcttcctcttgctctatctctctctctctctctctctttccatatcttccaatcgtagtccgtgttgtcatgtctgcccatggccacgcggactctgaagaggctcctgccaaaatggagcgggactctccggtaaacggcattcatttgaaaaacggcgagtcgcgtacctcatctcgatctcctctccctccgaaaaaagagtcctcccccaactccgacccatcccatacaatgaaggaaaacgttggcgacatcgttcttaaacgggaaccgggccaaccgctcaagctgtctcgcagctcgtcgcaaaaagtcgcgtcgcgacctccgccgctgtacacgcacctgccagatagcacccaggatgcgctcgccacctttgaacagatccccggctgtacctacgccaacaaatatatgggctacaccgaacatgccatggaatgtgattgcgctgaagagtggggtaagtttggttttcgagtagcctcgctgtcttcttgcccgattcccggcctgatggaacctccacgagcatatcactgatccactctgtagatccgaagattggtcaaaatatcgcatgtggcgaggattcggattgcatcaatcgcgcgaccaagatcgaatgtgcgggcgactgcggctgtggctccgactgccaaaatcaacggtttcaaaaaagacagtttgcaccagttgccgtcatcaaaacagaaaaaaagggtttcggattgcgcgcggaaaagaatctcgacccgggcgaattgatttacgaatatgtcggtgaggttgtgggagagcagcaatttcgaaagcgcatgagacaatatgacgaggagggcatcaagcacttctacttcatgtccttgaacaagggcgagtttgtcgatgcgaccaagcgaggcaacctgggccgattctgcaatcactcgtgcaatcccaattgctatgttgacaaatgggttgtgggcgagaagctacggatgggaattttcgctgaacgcgcggttcaggccggtgaggagctggttttcaactacaatgttgatcgatatggtgccgacccccagccctgctattgtggggagccaatgtgcacgggattcatcggtggacgcactcagactgagcgtgcgaccaagttgtccaatgcaactatcgaggctcttggcattgacgaggcagatggttgggataccgtggtggcgaaacgccctaagaagaagaagatggaagaggacgacgaggagtatgtggacagcgtgcagcccaagtcgctggatgaagatggtgtgaccaaggtcatggcggctcttgttcagtgccaggagaagtggatcgcggtcaaactgctaggccgtatccagcgctgtgacgatgaacgcgttcgcaatcgcgtggtccgaatgcacggataccagatcctgaactcccagctcgctcaatggaaggatgatcagaacgtggttctgcagatcctgaacatcctcgacgggttcccgcgactcacccggaacaagatccaggactccaagattgagacgaacatccggccgttgacgacctgcgatgatgagcgagtcgcgaagaaagcggccgcccttctcgagagctggtctggtctggaagtcgcctaccgaatcccgcgcatgaaacgcggcaaggacgcgaagcaggcaattaaccagttcgagcgccgcgaaactggacaacagcagcgccagcgatctcttactcgctctccgtctcctgtgtacgatgctcctcgtggaccagtgcagcaacgaagagaacgaggtcctcagcggtccagacaacccaaccgtcgtggccctcggccattgcccgagggatggtatactgcggaggcggatggccgcatttactactactctgcatcagggaaaaccacatgggaacggccaacgttgcctgctactcctgttactcctgcgccaggtcagcctgctaaaaatcaacagaacttggcattgcagagtatcattgatgggattatgaacacccaggaggacacaccctccgagcaccgaactgatacgcccgtcactcctcggccttccgctgatcaaccggagaaaagacataaagatggagagaagtggaggaagcttccattggagaaacagaagagaatctacgagaacactgtgagtattcacgcaaaacacgagatataactagactaacatagcacagcttttcccgcatatcaagcctgtggtggatcaatacaagcataagatccccgaccatcatctcaaacgatttgctaaggaggtaagctcatggtcctcccttcgattctttctggtgcgatttcaatttgctgacatcctcattaatagaccgcgaagaagctcgttgaaagtgattacaaaaataatcgcgtcaaggaccctaccgcgaagatctccgcgaagcaccagcaaaccgtcaaaaattactgcaagaccttcttccgcaaggcggcagccaaatacgtagatcgcgagaagcaggagggcgagaagtcgcaggacgccaccccaaaccccggaagcgaggttcctagcacaggtgacgatgaagctgtcgcgggtgcgtctgcgagttctcccccggaagacgatgacgcgtctctcaaacgcaagcgaaacggagtcttgaatgtcgacggtgctgaagaaggagccgcttctccctcgaaaagacagaaatctacacccccaccgcctcctcctccgccccctccagcagatctccctaaagaagatggtgatggtgataccagcatgggaaacaccagggacgcttcatctccgaaagccgagtcgggcgctggagtcgacgttgccatggaggtataggcaactcctgcgcgtcttgtcttattttgtgcttctgcatcaatacccaaaagcgagtcaaaaagcgagagaatcggaagaaaatggagggattaaaactgatatctcagtaacctacattacttttgcttctaccgtgttctttttgtgccttttttacctttcttatttttttgctttctattgctttctatgctgtcgacaatacccccgagcccaagtgccactatcatagtttgcatcaattcagcccatcttgagctgtaagcttgtcttttaggagatctatacctctaggcggatatctaaaagtccacaagactaccatcatgatcgatatcgatatgctcaagtgtcaacatctatatctcgattaattttagaaaatctttttgatactacacactccatccatcatgcataattcattcgagtatatgcaaagcacaggcattacagactcccaaagaaaaacccatcagaccgaacagagagcagagaacacagagccgaacaggggccccccaaaaaaaccaaaggaattttgccagtaactttgaaatcaaaaaatcattccagcgtgaaaataagaacaggaccatgtaccgtaaagagctcaccagaaaaagttgcaagagacaaaaatctagtagaaactctccacgatactatccttattgacaccagccccggcggcgccgccgggcgccatctcgccgagtcggaacacggactcgataacgctcagctcagtggctgtggtgtcgaggccggtgatggcgagccagtcgttgacgaccatgccggcgccgacgacgggggagccacggttcacactgccggccacgagggggacttgcaggagcgaggagagctcgtcctggtcgcggattgaggtcttggggtgcacgattccgccttggtttgagagggccatgtacgagcctgtgaggacgttgtcggctactgtttggcggaagacttctacgccgaggacgtcggcgatgctaggaaagaagatatgttagttttggaagaagaaaaaaggaaggaagtttgggatggatgaatgcgttatgagggctggactcctactcacatctcctcagtctcacgctccagatccgggtgcacgattgcgacgtggtcgttgcagcagataacattgccaagcgcggaaaggcgctcttctatgcgttggattttgacttcggctggaagcgtgttgcgcaggtgttgcaattcttgatctgtggtggttgtggggacgaggagacctttgcggttactagaggcgagatattattagcatttgtgtttttcttgataagttttcctttcctgacaggaaaaaaaaggctgttcattttgaactagctatggccgactcacccgacgattagacggccgacaatgcgggttccggcgatggttgcgtggcagatgggaatgacatcttggagttcggattcgaagacactgcatttgagtgttagtggtagttcctgagtggattggggtagaggctagggattgagattgagatttgaactggcacagcattggcagtgtctggatatgccttagcaccacccttcctatccatgccagtcccaagtcccaatctcacacccttttgaatatctgaacgacacacctgtagaagttctccgaagcaccaaccgcaacgatagcgtaggcatttgtcaggcaagagaaaacgccgaccctagaaggaaaccgtcagccgcagcccccgagcgttcgttctttgcttttgggagatcctactcgttcgagttctcgaattgcgcgcgaacagccataatggttagagtatcagaagatgttgcaaagagcagagtgggaaaaagtgtgcggtgaggagcggggtagcgaaaagcgcaaagctagcagatgcaagatcaacaggaacggaaactgtgatctagaattagggaattcaaggatcgagtctaagatttgcagaatgaagccgagataaataatttggcagagacgtgcgatccaactgaaaaaagaacaaaagctcgagccaattagaggcttcgctgagtttgccccgccggagccgcagaggcgagttggtgggttggaaatatgtaccggtactcattttactatgggacaaattatggtatactatgtaccgctacttaatttatactgactcattctgtctcatcttgacggtgattcattctgcatacaacatagtctaatattccaaggtttactctaatatcagtcatagctacgcacagccatgcacagccacaagaacaaaacataggcctggctagaagctagaatatggctgatgctacagcatgtcaaccctagtcatcttactcatccttgctatagcccagataccgaagtgagaaatcaatctaaatcatcaaaagtacgtattggactagatctcgaagggtcactgcgcacgcgcgacattagaggaggcctaagcttgcgacttgccagttcgattcaagagaacgagtgcatcttcatcaagatactaagtacagagagaggaaagaagaaaactatctacaggctgcattctcctggttttgtgcggtcttcttcttctgcaaaccatgcaaaatatggaagctcgcttaggttcccttccaatcgaggaaggagcgattctcccagaagcagaaggtacagatggagtacgaggccagatcgtcatgcagctgactacctcgtacatgtatcccaagagttgaccgctcccaaagtatagccaagccggcgcacagaactgccccctctcttttatgatagtggcagttttcgtctttgcgcagttggacccgcctccattgcctttgtaatgtgtttttgcaagatctggatagtgtttgatgtggttttcctgacataatttgcaacaaatattcatcgccgaaagtagccctagagccactatgctttttctctggagttgctggatttctttctgccgaaaccagagatcaggagattctggtgtatacgttgatattcgcgtcatctgttcgcgggatggagacgccgaacatcaggctttcaggaagcctagtccaggcattgaccaatagaacgaatggaataccaacagcgaaaatggacatggggatttgctcgaaggaacttccgaactgtccatgcacaagcgcagcataaaatgctggcgcaaggtatccaaagttaactatgagaagaaagctatcttcttcgtcctgtgatatgataactctgcctctaccagggtatgttgcagagccagcatgtgtttcttgtgtatcatcccgataccagccagctagtacctgggcagtgctgccacgaacctgccgaagggataaacccgccgccaagatcctcgagtctgaagggtagaccattcgattccgcatttatattcttcctccggtatagcatggaatcgagcgggagattactccaattatggagttgtaggactaggaggcgaggaagagaaaagtagctatatcgatcaagttctcaacataggcaacctctgcggcgaaaagagccatttgctttagcgacgacatctcgatgaatgtctcactagtagtaggtgcatcctttctctttcctctggtttcctcgggaaagccatccatggctcttgcgcagtccatatcatattgccgtgttgatgagttacttctttatatccgtccctccaggaattccaggagaatatttggcgacttggtcaagtggtattggaaccgggcaccgaaggactgggacatatctttccagtcacgcaggagggcgtgacatcaagacgttggacaaccgagcttcctttccatgtttttcgagcgggactgcgtactctaaacaatgaatcccattcccaagtatttgattgtggtggccatattggcctaggctctgctctgagttgttggacctcagctcatggttgaatatagcggggaattccatcgtcgatgaatccagttttatggttgattggcttcgtctcgggagttggattaatatttgtatatagagtagcagagttccgcatggcttctccagatagtctgatcgatccggcttgatgatggcccgttctgaaaaccaaggggtgatcttaaatccattgtcatcgatgatttggacttggattagagccatttcgcatactaccgatccagaggcaaggccgacagaggcaagccttcaagatctgcatgcaatagtggaatcaatccactggttgccgtcatcatgctcctcaaaccagtttgtaatagtgctggcatcgacttgaagtgaagtgcctccatgagaaaaggtctcgagaagtcttcgatggctggtgggtttttgtatatgaggagttatcggcacatgcgagagaagtcatttttggaagctaagtttgtctggtttgtgtcgtagacgtaaatgatgagtgaaagaagtgaagggggtaaaaaaggtgaaagagaagaaacaagtggaagaaaagaaagaggtggacaaagtggaagtgagatgggataaagaactcccagtcaaaacaattctggcgtcttctctaattaggacatcccttcgatgaactctctcttgacttcatttgaatctctcacttttctcacttgctgcttactttcactttactttcacttcagatctgatctgttttgatatcacatgtctcttactctttccttactacaaaacccattcaaacgagaaaatgtattcattctgatgccctccccccctatccccactcaggggggaggacatcgcaactaaacgtacaaaaaaagaattggtatcaactgcggggaacgctcacaaacatcttggtacaagccggcgggtctagtacccgcgcggcgggggcggggggggcgcgccgggcggcggcggccggtagtatcgnnnnnnnnnnnnnnnnnnnnnnnnnnnnnnnnnnnnnnnnnnnnnnnnnnnnnnnnnnnnnnnnnnnnnnnnnnnnnnnnnnnnnnnnnnnnnnnnnnnnnnnnnnnnnnnnnnnnnnnnnnnnnnnnnnnnnnnnnnnnnnnnnnnnnnnnnnnnnnnnnnnnnnnnnnnnnnnnnnnnnnnnnnnnnnnnnnnnnnnnnnnnnnnnnnnnnnnnnnnnnnnnnnnnnnnnnnnnnnnnnnnnnnnnnnnnnnnnnnnnnnnnnnnnnnnnnnnnnnnnnnnnnnnnnnnnnnnnnnnnnnnnnnnngtgggcccgggtgggcgtgggtggggtgggggaggagagcacggtggtgcgcgccggggtcagttcgcatcattggcagatgttggggcatgggctcggtcagagccgcatctgccaagatggaaagtgcccgtgggtgcacggggaaatcagcgctgccatcgtagctgacgaacttgccagctgtctcttgctctcggatgaaggaggctgcattcagcatgccgttgaaggcatctttggcgcacatgcgcagggcatcttcgtcgctgatttctgtttctgctggtgcgatctcctcgttcaggcggcccatccgtactctctggacgaactcctcccatccctcctccgcggccacaaagtccgctgccccctccgggtctcgaactgcttcggctgcaaatccgcgctctacctgtcttaccgccgtatcgccgtctcggaaaaggaagtgcttcacggattcctcggaatccgatgtgtcgtactggggattgattagctgggtattcgtttgggaagtcagcgtactaacctcggtgtgttcatcatcctcggccaccctgcggccttggatcagggccatcatcttgcccataagcatggtaaccatctcctcttgcatttgcttgatgagcagctgtttccacggttagaattcttcagtgatacaacttcgatccaaacttacatttgcagtgtctttgatgatgtgaacttcgcccacatatttctgagtctccagctcagtgttcgccgtgtactcgatgttcaatttctcagttgccttgcgttggtactcatccagatcccgctggacttgttcgaactcagggcattctttgtgcgcatttttatcacgggaaagcttgtgcacggtctgctcggccatgaagctcagcgcaatatgctgtgcctggccaaccttcttgaagagcgcagacatttcctccttgcgagattttgtcggcatggactctggcgtaggcgatggggtgggaccacgccagttttcgttaatgtcccagatctcgtcttcgattttcttgccgcgtttgatcagagtagccttggcacggccacgtcctcgaccgcctcgaggcttggtaactgctgcaggtcgaactgggccgacgaatccaccgcggcttccgcgaccacggcctcggccacgtcctcgaccccggccgccacgggctcctcgacctccacgacctcctcggacagcgctgtcggcaggggggtcgaattcttccgagggaatagggatgtcctcgggagatgtttcattctgagttgatatctctgtgccatttaagtggctttctggagtctcttcgagctccgtctcatcaatccgcagctttttgttcacgcggtcctcggaatcaatatccggagtttcattttgctgttccagtgactttcgtttatgcagtcggggtgaagacacctgattggaaggcgcttcttcagtctgggaaattttgggactttgacccacgggagtagctcccggcgacacaggggccgaagcaaccatgcgaggttcaggggattgagatactttttgaaagggaggttcggacttgaattcctcgtcatactggtgcatgtcatcatctggctcggtgatctgattatcaacggccttggttggtgagacatcttcttcgaaggagccctctccatccggcttcagtcttgctgattgccgggtggtccgcgaggactcaggaacagtccgaggatgccgaggacgccgcatgcgaggggtctctggattttgcgagacggcattgattgcggtttcattttcattttcgccatcatgggcatcatccgcatcagcttgaattagtttgagtgaggaaatttttaatttgacgatgtgcgagcgaacttcaggtctgctcggtgattcatcggcaggaagatggccaggaagactaggaacgccagggaatccagcgcggccacggccgcgaccacgtcctcggcctcgacctcttccccgagtagaggggggagtgggaatgatatctatacatctcagagattggaccgatggcgcagagctgtatatgaacataccttgtgcagtgcgtccagatcgcgtagaaatactaggagtcctagcagcaggctgtgcagccgcgcggtttttccttcttcccaccatcgctgttggtctgaagaaaattagttttgaacggggaattgatccagtagcagcaagggggaagcgcgggaaatcagggtggtaagaatgaacaggaaaatgagatgtaggacacagaggtgcaatggaagcaagttcccaagctcttcagtaggaaaatagtagaaaagggcaaagtacaagtcgcgtttccaaatgcagaatggagaaaggaaacgtcactcttgtagcaatggagaaaaaggcttggcaggaaaagcgtgaagtagaggtaatacacgtcccagatcagaagaagcaaagatgcagagatgcagagacccgaagatcccagatcccaagatcctaaagatccgacgaacctcacggtcacgatccaggagacagggtttaccagcgataagaaaaacaaagtgtggggagtggaaatggaaatggaagggggagacagggaagacgcaagtaagaacctaccaaagcgacggatctagcaaaaaaagatgcgaagtaatcgaaaacgcagagatctactgcaggatttgaccgggtggatggggaaaacggggccaagtaagaaaaaaaacgggggggagagaagaagatgcgaagaggaaaaaagaggttcgatggaataagacagggaaaaagggccaaaacaaggtgattaggagaagttggaaccggcgtctcacacaattcaagcaacgggatgtgttttgttgaatcgaattgaatcaagtcgaagaagaaattgcattgttctgattattgtgtattcttccattctatgtctattgagcccgactttgccgctcggctgaggctcggaaggacaatagcatacaccttcaatacatgactatattctgaatagaatacattcattccctctacaactgccttggaacaatagagtctataccatcatgtacgtgtatcgattcccagccacttccggcatacgtacgggggtatttggcatggacaggtctacgtatagttactataggtatgctgatattgtctgtctatttatcttatcttcaatagactattcatatactgttcatatctattcacatctattcacatctattatccttcttgatatcttctatagttatccccttcccctaagaaaaaatatacggacccacttaagtctaagagtcggtgacaacaacgcatgcggatgacttgcactgtagactatatacatattgtatatattgtacgtactcttcatgctattactttgattctatgagccccagctgagatatattccggagtatcttcagataatgtgtctcttcaaggcacgctagtccacgtcatccctagctacggagtactttgtatatttcctttttgccacaaggctgtcaccaggccattaattaacatggcatcattctcaagtccatcaggagtaaaataaacttccaggtatcgtataataaagcgcaacaaatacgagtgccaatcagccacattactccgcactactcatcgtcgaatatatactttgacgcattcagtaactatatgccgcagcaagatccaattataccatccgtccattccctatgtacacaaaatatatccaaggatccacccatatccatacccatcatgtacaaaaaagcaaaagcaaaacaaagagcaaaaagcaaaaaatcatgcagatcaaatataccgaggtagatcaatcacttttcataaggggattcgttcaattcatatctcttctcggaatgcgaacgagcaaaaccacgagtcggcctcgggcggaagctctcgtccgactccggcaatggggagggcgtgcgcatcgcctggtcgcggagggagcgggcagaccgcatgcgcgtgatcgtgccggccgtgatagtctgtcccgcgctcggtgaggccttgaccattgtgcccggcgcaaaggtgggcgatggacagggactagttgagcggaagagagggtggatgttgttctcgtcgaaggggttgtattcccacgttgagctgttggagctggactgcgtgggggagtcgacgcggattgtcgacgctgttggcgacggcatggggtgcactagccggtctaaggagagtgcgcttggtgggctgcggcgtaggctgggcatgctgcggatgctgtgggtgccccggggcagggagcgagggtcccggtatgggagggtgtcgggctttttgtcctgtgttggggatgggctccgggaggtgcgggttgaggagctggtgtcgatggacgcgttcttctcttcctttgtgctggaaggacagagtgttgcgtcagagtagcggctggaccgccgggggaatttgcggagggaggatcttttgggctcgaatagctcggacaagtcgcatactcgagggggtgatgggaggaaagtagggctttgggggctgtccttgagctcttgcgagttgatatcttgagagtgggcacgcggccattcagggttggagttctcttgggctagtgttactgcgagatatccgcagtacaagccctgtgcgaatactgatagtgcccagaacacagagcgaaccacgaagatcgaggttcgaaggctcattgccattgccccggcagatgctgcggcggcaacaagtaaatatccaccggcgacatacatgcattgtcgacggccggttgggatatttcggtggtacagtagaccgatggcaatcaaagccacgcagctcactgcacttaggatagtcgaggccacatcgggcgaagcttttgattttgcgtagcagataccattcagaatggtggcaatgaatgtcatgaacaatgaggctgctgccaacgagtaagataggtaagacatggcgaaaagagaacgatttggcaaagaatggcctggaagtatatatatcaaagagagtaagagagtggatatgtcaaacgttggcaggctgccaatccaagacgtttaccaatgcacgaaatgagtgttaggaatctgcagactccatgagagggaagatgtctgtatttatgagtcgagcatgcgtcgatgcaggagatggttcgcaacacgggacggggcaatgcggatctcagcgtggctcaaagtatatcgaccggggaagcagtcggtgtcaacctgtcaattcttttttttcccaaaggagccggtctgatctatcattccggcatggtggttagactttgtatataatcggctttgacagggatcatgtcgattggcctaggcagagcgatcccgccggggatgcataatgtgtgtggatatcggcaattgccatctttctagccattgaggcgaagacattgcgcttaattctggggtagccctatcctgtcaggactcagcctagacccgtcatgcagaggaatccgatagtctgatttagtcctctgcacgccttcgcatatatctaaaagacgtaaagacatgagacacacaaaagagcatctgacaatatattggagtgttcttacggagtacattaacacccctaataggtatcatcttggacccgacaaacacactatattactgaaggattactacgtcaaagacagagcgcataggcgactattctcatttctttaatctcactaactgacactatttaatctgatccatcagtcttgtggacaccaccgcccgattgaggtggcggatcctcttcgatctcaatagtgcgggccgaatgtgatgtgtctctctcccttgcaagagaaaatctccgcgctcccctggatctcggctgaaccagcctgagataagttagtgcgaattaggcagatcgaagattgtactttgtagattttatagatccatacttcgtagtagctggagccacgggatatcttgacctgtcctgcaggaactatggagtatacaggttgaattgtctgtttccactcttccggaagaagcctgccgcatgccattgagagtatttgtcagttttaattaagagatttgcgtgttctgtggatttttcatatgtatcctttttccgtgtgggtacgatatgtgcaatgtgcaatgtacagtgtacaccctccgtgctacttactgagaggcaatagtggcgcttaatactatattatacaggagttcggaagtaccgagagttcattgtagagaggacttcgataccattgcagcaatttgggatatagatttgcatctccaacctgttgactccagatgtctgcccaggtgggatgttgtcatccaggcggcaacaggcaaccagcttggaatcaaataatccgatgtacacatatgtacacacatagaccgggagagagctatacacaatatggagcctataatagctgtcaatatcaaaacttcctttcaaaagttaccctggcaagttgacgcaagttgtcatgatcgtggtagttgagtagtggaagtaaatccgaaggcggtcaccgcactcgtttgctatcatcgtcactctgaatgctcccctcctactttcttttcttttcttcgacttttcttcgactacatcgctgagaggatcctttgcatcaagtaatctccctctctcctatctcaatccgtcatcttttctccctatccctttgctccctggttttactcaaaagcggcaaaatgaagctcactttcaaggtacgaaaacttgctcttggggtcctcactgctgcagactgctgacagtcatcgattacaggatctgaagcaggagaagtttgtcatcgatgtcgaaccttctgaaactgtacgtgtgttcctgtcgctataactacccatcgtcatctagtgcggggctcatctgtttaggttcgcgaggtcaaggtcaaaatcgcccaagagaaaggcgaatatgaggcagagcgcatgaaggtcatctactctggttcgtattttcccccttgctagacggattctccgttcacggtgctatggctaaccttcgctttgttccctttataggaaagatccttcaggatgataagacagtcgaatcttacaacatccaagaaaaggacttcctagtgtgcttgccttcgaaggtataggttaacctggtctatgatttccgagccagagctgacatttgatgtagcaacccaaggccgcctcatctgccgcttcctcccaagttccctcgaccccggctcctcgagctcctgtgtcaacgcctgctgctcccccggctcctcatgctgccattgctcctccctcttttgccgcccccgcgacaccttccccggccggtgcagctccagctccagcgagcggtcccgctttcggagacccttccgctctcaccatgggctctgccgctgagggcgcagtcgtccagatggaggcaatgggattcacacgtaccgatatcgaccgtgccatgcgcgccgcattctataaccccgatcgtgccatcgaatatctcctaaccgtaagcttttgttggaagttacttcttgaatgtttgctaatgatcacgacagggtattcccgaaaacatccaggaacagcaacaacaacgacaagcctcagagccagcccctaccggcgctgctcctgctgcccctgctgctccttccagtgatgagccgcacctcaacctcttcgaagctgccgctcaggccggtggtgaaggtggtggccgagctcgcggtgctgctggtgccggtgccgctggtggcgaagctctcggcagcctggagttcctccgcaacaacccccatttccaacagcttcgtcagcttgtccagcagcagcctcatatgctcgagcccatcctccaacaggtcgccgctgggaatcctcaaattgcgtcaatcatcggacagaactccgatcaattcctgcagcttctaggtgaggaactcgaggacgaggaggctgccttgccacccggcgcgcaggccatttcagttacggaagaagagcgcgatgctattgaacgtgtatgttgaaacttcccctcgatctcatagttttatgactaacccacaaccagctatgcggtctgggcttccctcgcgactccgtcattcaggcctacttcgcctgcgacaagaatgaggatctcgccgccaacttcctcttcgaccagcctgacgaggatgagcagtaaagaattattgttctcttttcgacttctcttcctctcctacttttcccctttaacgttatgttctatgatgaataccaagcatgctgctgtttgaattgattcccatctctcctcaccggatcccttcccatgaatacgactcagtgctcagctagcgtgtctgagttcctgtttgctgagtgtgtacttggcttctttgcatcccgctgttccctttctccataacgcctgttatgtatttagcttaatgggaaaaatgggacttgttcgctgcatttggagtatgagtagtcgtgtaatgttctaggataagtggcgatcttcaatctggtcatctgtcatggtgtgattttcggtcatgcgtattttatatgcaggtagactgtgcagatgacctgcgaatagtacaaggtatccgctttggagaagtctatatatatcctccacttggtactaggccgcgagacccgccaaatcgtcataatatatctccacccagcattccttatgtcgagttgatatatacaacagcccttattgccattatcaggcaacattccaagagtatgaatgtatttttcgaatgtccgtacaaatattcaaactgacaatgcgctacccgcataccataacccagctgaccaacctacaggaataaaaaaagccattgaataaattgaacatggtactacttacacgtagtcatgtagaggtaagtacaagaccagaacccccaaagatatcaactcgaatcacgcccatccccaatgcaaaaaaggtatctcatagacccaggaaccaaccctaacatgcaccgaaaatattcagagaaagagaaagaaaaagagagaggaagagagagtgctcaattcaaatgagaatgtacataatgcatgtatgtagtttcccaaatacacaagatgaacaaaaaatacaacgccgcatccatggacatacgtagaagtacatccatgaacgagaaggagaagaagaagacttatttgcaagatctctgcacagaccaaacatccagcccacggcgtccaacgacccgtttcagagtcggcaggatcccgtcgtcgccgaagtccatgtcatcgaggttgaggtggttgcgatacgaccacagttgatggagctgcaaagtttggttttgggcttgggcttggtcttggtcttggtcttggtcctggtcttggctctgaggcgcagagaagacgtattgatcgaggaaagtagccgatgtaggcgcgactaggaacacaggcgatggagtagagcagccgggtacaaccagctccagctgctggatcatatccacacctgacatgcccatgagatccagcgtctggatttctgtggactggtcgtctccaccgagaagccacagcggtggggagtatgtcttccaccagaacaccgttgcggatggtatgtacggtgttggactagatgagacgatgtcgcgcattgctagctgcgtgggaacgacgccgccttggtggtagacgcccataaggaagcccatggctgcgttgaagatgacccatacaacaacgaggaggcgggagccgcgcatggggaagcagctgaggaggaggggcacgactgggaggaggaagcgtggttcttggtgcggaaagagggagaggagcatcgttgcagagagcgcggagagggcgcgcacattgcgcatccagtatggtattagcggccggctgaaaagggagactatcattgcaatgtaggctgggccgaggagttggaggaggtttgcagtgaagtgttggtagtgggggtggaggccgtgctgggctaggttggcagtgtcggtgttgtagaggaggttgttgaggggagttattatggggtggcggaaaacgctgaggaaggaggcagttggccggtagaagatcgtgtctgtgtagatggcgatgaaggaaaagaagagaccgaagaggaggaatgctgcgagcccgagtggtctggcgcgaaggcggggttagcacatgtgtattgatggatgagctggaggtaaaatgtatgtatattgacgcacttgcgctggaactgaggcagcaattgcagacccgggaagagaaggaaagccgggaaagtgatgcggttgaagacgcccactacggcgatgaaggcaagcacggcatgggagaagaaggacgagtgtcgctggagctaaggttagcatggatggtgcgctttggagctttatctctcccaccttattgttgacaatgcgccgaatcaaaaccagcccccaggcaaccaacagggtctcgaggctgttggaaaatgtgtgcgtctgatacgtccaggtgacatacgatgaggccaccagcaccactgtcgcgcgccgatgacgcggagaaggcactagctcatagatcgcccagtcctcgaggacaaaacttaataggaacattccaccgcgcagcgcattgtaaatcatgtggggtggggggctgccctcgccggtctcggtatagaaccatttcaagaggttcattggaagctcgtaggccgcccatattgggaatatgctgcgaatggggtgttcaacggtgaattcccatggtatcttcgacggaaatgagaatatgcgacctgtattcaggcgacttggtcaatgtttgttcttcgtataggagagtcgcggaattgccggatcgcgctgttttgctttctgctttagggaaaatcgcaacaaagagttcctcgcgtccgtatagtcgcagtatgatcgcgattggtggggcgatcattggatagttgaacatacctgcgaaaagctctggaccttggaaattctcatcaggatgtagatagcttggagacagcgcaaagtacacccgaatcaccaacaacagtaaatatgttcgacgccacatggttggagaaatctaggaacattattagacgaaattaaagaatgaaagtaaagaatgaagtgaagggagaaaggagggtgggctaacactaacagaaaagaactagacgcgtatcattggatgatatcactgtcgcgttaagcggcaaattggagcggagattgtgagaggcacttatagatctattactgtgagatttacattgagatatatctgtcttgatctgctctgatcattgaagcctagagagtctgttttgaaagtgacgtaatgtttttcaccaaaattgtgcacgacttaggcccccaaggttgttctggcgctccatgagaagtacgagtaccgccagactccagactagtctgccgcactcgggttcggaagtcccctgcgatagtacagcccgggccacaacagtcactggccattgccgctgaggatccatagatgaagtgggctgtttcctcgtattcttattctcgtattcctatgccgaatgccctaacagcggttccgtctcccttcctcgttatagcggcttggctcgaagcttcaaatcccctagaccacattggatcgaaatattattcggcttggtcttggcatgcatctgccagcaccgcagagtggtgttgaattcccaagcgagttggcttcttggcaggctgctgctgttgatgtatactagggcatatgcgaccggcttgcctggatgaacaggcgtagatgatctagtctgatctagcttacggtcgccggaagattgagatcgcatcttgactcttgccggttgcctagagaaagtaggaatggctgaaccgacgtccatctcgggtggattgcgtgccgggccggtattaaaggtggacgttcttgcacctcatgtgtcatggtaacatctctgttgaagaggtatcattacaggccattgttgaagccaatatagttgatctggctatgtcatcgacaaagcgggagcggttactgtgctccgctatgtaatgctccccaatccacaaacgagatttgcacttaaggagtggtggtggtagacttcggggaaccacttttcgcagacgttctctttttgcgacattctctgtttatagacgttgtcttttgtagaagttctcttttcatgtttcgcggaagttttcaaaggacgcaggcgaggtaatagagaagctctgccataaaacaaacaccatcgctcttatatttcattcataaaccgatttgtgagcctaatgaggcatactcctagcccttttatatagttactgttctactatgatggttagtttttctaacacgttactttatgctgtgacatcatacaagcacttattgtacctctttcgcgcttgggccattcccaattgtgcttcactgcagcgaccagcccttaaatttgcccgcctgaccagaagatatcgtaaatctgtcctaattggaaggaatcgaagtagacgtagtaaggcgacttcctatgaaacacatgtttgaagcacgggtctgaagtgttcccatggatagacggattttgtccgtaactactttaggttgactagaagaggttgtagtttgttcgtgtatggataattagaacagagcaggatcatatccggctggtcaaatccattttcaatagggttgtctttgagggaagcctcgatgtcgatatctagatccttcgagaatatagatccatacatgtttagcttagtacttggacaatctactccgtacaaagaatataattcagaaatacattacaccttttaccaaaatacaaattccagccgcccagattcttatttcagcccgtaaatacggacagccgccgttggttctggcttagtacggagtcaagccagcgcttccaaggttgcattcccaactgttggctcaagtcacaggctactagtctgtttttgaccaggttctcgtttctttaaatcaaaagaatgagtcaaagcaaataattggtctgatttaggcaacggtccgaaactaagacgtgggggctggctttgtagccttgtgagccttattggctttatggataccgaccgcctttggtaacttagaactccctaaacctcatcacccgccatctactcgttacgtcttcgtcattttcaacctgcaacttctctcttcagacacaccaacttcgaaacctggatcttttcgttcaataagcctacacctttccacgctttttctacgcttggtcagtaacatcgccaccaccgaacgccccgcactactcgaaaacgaccagcaacactaacttcagaacattagaacccatctccaacatcataaccatgagtgctatcaccctcaccagctccgatggagtcgatctttccgttggtaggcataatttccacagcagtcgcgagtggagctgacagattccgaacagaacgcaccactgctgagcgctccgtgctgatcaagaacatgcttgaggatctcggcgactctggagaagccattcccattcctaacgtgagtgtctatttccgagcatagccaccatccaagatcagccgcttacacctctttgtccaggttaacgaggccgtcctcaagaaggtcatcgagtggtgcgagcaccacaagaacgaccctcctagtgctagcgacgatgacgacaaccgtcgcaagaccactgacatcgatgagtgggaccagaagttcatgcaggtggatcaggagatgctcttcgagattatccttgtacgttccgtttgcagacttgttcttcggtacatttactgactgttcataggccgccaactacttggatatcaaggccctccttgacgtcggctgcaaaaccgtcgccaacatgatcaagggcaaatccccagaggagatccgcaagaccttcaacatccagaacgactttactcctgaggaggaggatcagatccgccgcgagaacgaatgggctgaggagtaagttgccaccaccgtatccattgattgaatctatgctgacatcctgcgctagtcgttaaatgatgataatgtgtctgttctctctttttaaaacagaaaatgatatcctcccggctgtttacgacaatgtgcagcgtagcccttgatgtcaaagtagggtgattgtttttcggggcgttcttttggctatttttcttcccacggtagtttgatatgagttgcaaacaatcgctagccttgccaatggcatttgttacagtcatcctcaaaacagtagcattagatagcggggcggtgaagtcgatccttgcttatatttgtccaatgacgagaacaggttgtaaaataagcatataaacgcagatcaaggctgtactacaaatcgtgatacaacagtaacacaccaaccaggaacagacagcatggaaatatctccatgcaatgccccatcataatctacaaccaagaccaccccaaaagtaggcaaaaggacattcaattcgatccaatcagattttgtatcaaaaaagaaaatcccccgccacgccagtcctacaagcccgcccccaataaagaagacgatcagcccccaacagcaacaaacccttttgcaaacataaacccgggcctgccatccatctcgacaaattatgcgtgttggaaatccatcatatccccactcggaaccgtggagaaaaagcatgacgacccattggaagattaagaaaaaaagaaaaagataggcacgacccaaagcaagacccggatcaagattttgataattgaaattttttgtttgcaattgcactcaagagtagttccacgatccactagcgctctcaagttcatggtcaaggcatgttgttcgaaattcggttgtgggcgtcacatcatgaaaagggtttcggaaaaattaatcatcagaaacccttgaaccaccccaacacagacacacttcggttgccagatgacatcgcgagctgaactgggacttttgggaatggccggacggagggtgcgaatactgagggtccgcttagaccttcagggtcgacttacgccagtgtcggcgcttggcgttgtatctattgtagcattgtatcagccatgtgttcgattcggtatttctgtatttattttcccctccatttctgggttcgtgcggtcggcgcgtgcgcggttatctgtatttccctctcgcgtgcaccgtgccggtatcactcttcccacaaatggcggtcgcggatatatagaaatggatttggatctcgagacgaagggtgcgatttacctgatggtgttgccggtgcgcagacggatccactgggggatggggcggttctgacgctgagctttggcaagcttttgcttggtgcggaaggtcttgttgctctgtgtggaaaattgacgttaaaattttgtttctcagtgttcagagttctgactggggagagaaagacggcgaagatggcgcatgtatttttcgagaatggcgggaacagggtggtaacataccggcatcttgaaggttgatcgcgacggcgagcttgttggatggacggatgaagttatcgaccttcgagtgtggatggtttgtgtgcggcagggcttggcttcgcttcggttgggtcaggtgatgtgggatttgtgcctgaggcggtgaggccctaaggcttcaaggcagaacacattaaacctggcacagtggtctaatgctgtttaggccgagtacctcttggcactccgtttttgaatacaacataattatataattatacaattagttaaatagtaagttatctaagctgtggtattcatgtccgagaacaaaagagcccgttatgatgatatggctagataataataacggctaaaatacggcaacctccagtttcattccttgcaaataagccctttagaaggttatcagtcaggggcctcattctcgtgcgtctagaacatttgctaaaatgcagccactattcaatccaatctccgatgtatgtgatacatactgcctaagtactctatactgacagtctcaccaacagccccgaagctatgatctggagagagacttcccgctagacggaacggaccttgactccgtcacagacgagactctagtgacccttcttggctctgttcctatgatgcatggcattcggtattgaaaggcggcggcagtgtcctaccatgcgaagcagagatgctcaaattcgttgcgatcaaaaccggcattcgagttccacgagtccatcgttcatttcaagttgaggatgagactcagtattttagcacgaagcgatatatcgtgatggattttatcgcaggccaatctctcgacaagtgttagaccgacccactcgataataaccaatgacaaatcgctatgcaagttgcggacatgatcaaagagatgcagtctattgaaatcttgcagccaggccctttcgcggccggttcttcacggattatagcgccggtccgtttaaggactgtgctgaactccaaggctggtttaaccacaaacttgagatctgtaagcactacaacaaatgtcctaaagatatcccgccattccaattcagcacctttgtccttacccatcaggatatcagtcctcgaaacctagttctagaccggaatggagaagtgtggttgattgattgggcgaatgccggtgcatatccccctgcctttgaaagcgctgcattgatggctcagcagtttttccccggcttcaataaaacagttttggctgttattccacgatttcctgaggaagaactgcaacttgattctattacatatgggttgattactgcggcattggcctaatgaggtcttacatgatacatgaatctgtgtctttatgctatgattttggcattgctccagttctttaacttgctgatggtcaatgatccgcggcttacgcggttcttagcttgcttataccgtagtaccacaaacaggacattgcaggatgcagcaggatacaaggtggcatagtacctcgagtgattataacgattcctttgactacataagataaagcactaaaaaagacaattcatagagcccgacctaatttaatggtatgggaccttctatggttcgttccattaccactgtctccctcctgttccattatcactctctccctccaaattaactccacgtagtggtccaaacactttctctataccttttctattatctcgttcctcggaatgagctcggatgtccctaccactgcccttactcccgtcattgtacctgaattagatccagcctcacttgcattggatttgaaaaaatcctatgaaggccaaattccactgccgacattaccaaagccaaaacagcagatgagatggaaacagtcggcaacggatccaattgacaacctcatggatacgccaaaaggttggaattccaatgaacccgatcttgatcctaagtacgtatttcccgttatatccatatatatacatactgatatatactatatattgatctggatgctcagattgaaaggtgccgtgagcggatcgaggacaacatcatgagccagttatttcaatgaaagctggaggacttgttacgagagcagaaacgtcgcaagtgagtatcccctgaaagcctttttcttaaccgggtttaagtaaattatcagtgcgatgacgaccttagagccggctggcttgagttggcctgtcgtccagcgcttggacacccttaaagggatccacgaacacattctcagcgagaatgaccagtacgaggtggttggtaatgtgacgaatataatagcagcatatcgattgggtcaattgagatggaatccaggccttggtacctaccagtctaagggcgttcaactctgccagccgaggcctttcagatgggacgaaattaatctcattgatgccaaacatcagggtcacaaaggcttttgggtcgaaggggtacgtcttttcaaacaccaaacttatcggaaactaacatagcttcaagggccagggccaacccaccaatgattcaagtttaagctgagccacttcctacaactggcctgttcagacaggttccaacaacgatatgcaaataatcgacgaggaatcggatagagcaatcatcatcgattttggatcttgccggaagctaggagagagtctagaaaacgtcggccgtacctacgaatggtacaatggtgaagtgtagaagtctcttcccgagaatgacttgaacgccttggaagaaattcacatttggcttggtgttagttctaaaggggttcactttgaatagtaggactgggcacgaattcgtattctgctctagtgataatatcaaccgccgaagcgatatactacaaatacacgtccatctagagtctagcactctttaccgaactaagagccgtacgggttcctgggaagggctcctccccccctttttcttcttttcttcttgtcttctctccatccctccgaccaccatcttcatgcaaccggtggaatctgttcttcaaaaacagagcaagaaaaggaaacaaaaatgcaaaggtacgcgtctgaaaggcatgctgaaccttcgaaccactcatcaagcacacgtgatgttgtatgacaaagatttaatcgttcaaggcagccatctctaacccaaagagtgcatttcaacctgaacattgaaaacaagagaagaaaaaccttggaataaaggaaggaacaagggtgcagggtttcatgtgtgctttccctgcaaatcttgcaaccccttgatcacccgatttgctcttctacaggaagggaaggaatgactaaacaggaaggatctttcagatcaacaatcatgtcgaatttccgcccagttcactttgtgcctgcaaaccgtcaagccgagatgctggctctgccagtactgaagatctttgccgtgcctcatcaacagcaagccggtacaaaccactggtgcttctatcttatgacatcctcagacacatccgttcagattgattgtcaaccaagctacactgagcctagttctgtccttcggggaggctccaaagccaacctcgtggtttcggaattatcatgtcttgttcccaacgatgctcaagagcgcttcgagcttgatatcacaccagggctcttagttgggcaagtttatgacctcatcatccagaatgcacgccacaagtacgaattcgacatggatggcgtcgggtgtaggtgctgggccaccggccagcttggtcttttccaccaagctcaaatcattaccaatgaatcccaagttgcggcgacaaaggctgcgatcttgaagttgtggcctgagcagacgccgctcccgcttgaccaaggagcctattacccatgattcaatatttgtgctcggtttcatatgctattcatggaagtgctattccatgacttatcccgatttcggtactacttttcttacaacaaatgaccggaaatagccaaaaggaagcggatggttacggaatactgagactgttatatatggaagagaaagaaatctaatgttttcgcagtcccggaaatattgcgctcgcaatttggtggctgcccaagcaccttgcttcagtactccgtaagcaggttcaaaccagccttaaccgccatatttacctcgtataatcgtcgacggctatcgtatagtagggtaattttaggtagaagcattggaattgtgtctgtttagcggaaagtagctttggggctgtgggtgagactgtcattatagagtgaatcaaatagggaagtaggaaacatccggacgaggaaggactcagacatgaatgagccaatcaacatgtctctcgcttgacgggcgaatcgttctgggcaccttgtcacatccctggagatttgttgagatcacaactttgaggtgcataatgtgtctgtgcgatgggcgcgttcaaaatacttcccatcaactcaagcgcttcgatttattaccaccacacttaaacagtcaataatacacttgtcagcctgaatcatgtcatcagttcctattcgaaattctgttacgaaaatttctgattccatttggcgccttggctgcacaatcgagtgcaatcgaactgcggaaccagatgacacatgcgcagcagcctggaaagacggagaagattggtatattcttcggcatacaacatctgagcaactacccgatgctacgtctgcaaattcaccggttcgtttgatccacgaagggggtactctatctgcagtgtgggctattggaaataatgccatctgcaaagtccaccctgggaccctaataccacttcagagagcgaaactatcaaattcgttcaagataaggcaccccaagtacctgtacccgaagtaatttactcctgggtagatggaaatcgatcattcttggtgttgaaaagagttccgggtatcacgctgagagacgcgtgggaaactatgtccgctaccgaacaagattctatcttggatgaggttgttcacatgtacgatatactcgcttctattacttcggaccggctcgaggatgtacatggaggtccagtgtccgagccttacctggctcactcgaaacgggattcattggagccgttgagtgtctgagtgtaagacatttcttccgagaggatcttcatccaaatccagagattgaagagcgattccatctctatcaccccgatcttgcgccaggaaatataattgtttccaatcagaagctattggcgatcatcaactgggagagcgctggattttacccacgtttctggatatcaaccaaaccttctatttcccggggaatgaactttcatccgccaattccaggtattgaggaaactgaatggagaaagcgactcagagtgaaactcgaagaacacggttaccctcgatttgcagattggttcatggaatggatgaggacaaaatctagataggatagtgatttaagcactttttggttaatccggggatagatctatatcttcaccctctatatccttgatagaaaccatggcctctcatgagatagcactgggaaaggcgcaaggtgtttatctcggtcaaacctcacctgggcaaggagacatgggcaacaatcaatggccttgtccggagtaggtaaaaggagtaaagttgcagtcaaagcgtcgggcatcgggcatggaaattagccgacgcataaaaaaaaagtggaaaaggtccagatcgggctcgttgcggatcaaaaattcggtcgaaataccccgtataatcccagttatgactcaggtgttcgtattcgttttcgcgtattgcgttttgcgtcatggtgatgtgtttcgtgtcaaagtcaaggcatagtacggagtatgtgtgtactatgcaactcatgcatgcgccaatcataccggacctgcgtcaagcatggagtaatgtagctcgtggctgtcaagtcgtgttccccggaaaagggcgcgttcaagggatgcccttgcacgaggaatgtgaagaaaggaatgacccgcctgacctgtaactactccgtaactagttagttacttggaagccgattagcaatagagtcccggagatagaggcagggtctgccaggtctaggcagcacttgaggttcgttgcataaaagacacgtcggagttcggactacccgacccgaagagaaaaaagcccaagccccctcataagtataatctcagaacaaacgcatttagagcctcccatcccttccttcacccctgttgttaatctttactcttaatacaattactcctacctttgacatcccttaatatctgtccctttgtacctagctccttgattcatcgcagaaccacacctcttcagaccatcctcaaccagttcttcatggagtagagatccaaaatcgaaagtttcaacatgcagcagcccgaggagggcgtgacggccgttgagaagatgggggactcgcagcttaacgagaagcccatcgacaagcgcgattcggataccgcttccgcatcaacaaaggagcacgaaagcacgaccccagtcgcgacagacgaagatgcgatctatgctcacttgcccgagcatgagaaggagatattgaagcgacagctagatgcaccgctcgtcaatatatcctacttcggtctatatcgctatgcatcccgcatcgacatactcatcattgttattagcacactctgcgctatcgccgccggtgctgccttgcctctcttcaccattctctttggctccttggctacggctttccaaaagattatgctccgcaccattgcctatgatgaattctaccaccagttgacccacaatgttttgtacttcgtctacctaggcatcggagagttcgtcactgtctacgtcagcactattggcttcatctacaccggagagcatgtcactcagaagattcgagagcactacctcgaagccattctgcgccagaacatcgcctacttcgacaagcttggtgcgggtgaagtgactacccgtatcacagccgacaccaacctcattcaggatggtgtctccgaaaaggtgggtttaaccctaactgccgtcgctaccttcgtgactgccttcgtggttgcatatatcaagtatgcccccttggctggcatttgtacttcaactatggtcgcgctggtcgtgattatgggtggaggctccagactgatcatcaagtacggcaagctttccttggaaagcgccggtgccggtggaactgtggcagaggaagtcatcagctcgatccgcaatgcgactgcattcggcactcaggacaagctcgcgaagcagtacgagtcccacttgcgtcacgcagagcgttggggcatgcgtctgcaaatgagcctcgccgtgatggtcggtattatgtttggacttatgttcatgaactacggcctcggattctggatgggatctcgattcctggtggatggtaaggttgacgtcggacatgtcttgactatcttgatggctattcttatcgggtctttctccctgggcaatgtcagcccgaacgcctcggcatttaccaacgctgtggcagccgctaccaagatctttgcgactatcgaccgtgtatccccgctagaccctacttctgatgaaggcatcatccttgaccacgtcgagggtcacatcgaattccgcaatgtgaaacacatctatccttctcgccccgaagttacagtgatgaatgatgtttcactcgctattcctgctggtaaaactaccgcgttggtcggtccttcgggctctggcaagagtactgtcgtcggtcttgtcgagcggttctatcttccagtcggcggccaagtgttcttggatggccacgacatccaaactctcaacctgcgatggctgcgtcagcagatctcgctggtcagccaggaacctgttctgtttggcacaaccatctatcaaaacattcgccacggtctgatcggaacacgcttcgagcatgagcctgaggagaaggtcaaggagctcgttgagaatgccgctaagatggccaacgcacacgacttcattattgctcttccggaaggttatgaaactaacgtcggccagcgtggattcttgctgtctggaggccagaagcaacgcattgccatcgctcgtgctatggtcagtgaccccaagattttgcttctagatgaagctacttcagcactggataccaagtccgagggtgtcgtccaggcagcgcttgatcgcgctgctgagggtcgcactaccattgtcattgcccatcgtctatccactatcaagtccgcgcacaatatcgttgtcttcgtcaacgggtcgattgttgagcaaggttcccacgcccagctgactgaccatgatggtccttacttcaaactggtcgaggcccagcgcatcaacgaggagaaggatgcagatgctttggacgcggatgaggatgagagtgaggatggcaagcacatggccaagtctcacatcgcacgcgtcaagtcagttgctagtggctcaaccattaggaaggatgaggccgaaacattccaggagacaatgcatcgccaggagtctcgcaagtccgtgtccagtgttattctctcgcagaggactgctgaaggcgccagcaagtattcacttttgactctgatcaagtttatcggctcgttcaacaaggaagagcggtggttcatggccatcggtcttttcttctcgattctcgccggttgtggacaacccacccaagctttcttgtatgccaaagccatcagctcactttccttacccgaaagccagtatgccaagctcagatcggatgccaacttctggtcactgatgttctttatcgtcggtattgttcaaatcatcaccttctcgtcccacggtatcgccttcgcctttagctccgagagattgattcgcaaggctcgcagcagcgccttccgagtcatgctccgacaggatatcaacttctttgatcgtgaggaaaatagcaccggcgccttgacctctttcctctcaactgaaaccaagcacttggccggtattagtggtcaaactcttggaacaattctcatgacttcgacaactctcatcgcttcaatcgttatcgcactttccttcggatggaagcttgccctcgtttgcatgtctgtcattcccattcttctcggctgcggcttctaccgcttctatatgcttgccgcgttccaggcacgttccaaggtagcctatgagggatcagccagctacgcctgcgaggctacatctgccattcgcactgtggcttcgcttacccgtgagaccgatgtctgggcattctaccacgctcaactcgataaccagggccgcaaaagcttaatctcggtattcaagtcatcgctcttgtacgcagcctctcaggccttggtcttcttttgtgtcgccctcggcttttggtacggtggaactctgctcggtcaccatgaatacgacgtgttccggttcttcgtctgcttcagtgaaatcttgttcggtgcccagtccgctggtacagtgttctccttctccccggacatgggcaaggccaagaacgccgccgctgaattcctcaagctgttcgagcgtcggcccaccattgacacatggtcagaagcgggcgagaatttggaccattgcgagggaactatcgagttcaaggatgttcacttccgctaccctactcgtcccgagcagcccgtgcttcgcggcttgaacctcaccgtcaagcctggccagtacattgccctggtcggacccagtggatgcggcaagagtaccactattgcccttctcgagcgattctacgatgccctttctggtggtgtctacgtggacgataagaatatcgccgacctcaatgtcaattcttaccgcagtcacctggcgttggtcagtcaggagcccactctctaccagggtagcatcaaggagaatatcctgctcggtagcgccaacgcagatcccaccgatgaggagctagtccaagtctgcaaggatgccaacatctacgagttcatcatgtctctccccgatggctttaacaccattgtcggtaacaagggaggcatgttgtccggtggccaaaagcagcgcgtcgctatcgcccgtgctctccttcgcaaccccaagatcttgcttctggacgaagccacctcggccctcgactctgagtctgagaagatcgtccaggctgctctggacgctgccgctcgcggtcgtaccactattgccgttgctcaccgtctcagtacaattcaaaaggccgacattatctatgtgttcgaccaaggcaagattgttgagagcggcacccacaccgagctcctgcgcaacaagggtcgctacttcgagctggtcaatctccagtctcttggcagggccgcctaattcctttggatttgctttttaatatatgtacacatacccccttcttcctttcttaattttatctcacatctccctttctcaatcttcttcattcttgttatagatcatttgttgtcaccagcgaacacccggaaaccagggtacactgtctcctctcgataaagagaaaaaaatcaaaaaacgtccattagtgatgtaggattagatgaatgaatacaatgaatctcaattcaacgccgcccggtttcttcgaactccttccactcagtaaaaataactccttcaaaccgtttcaagtccgttccatcagtaaatctctcgcattctactacttcaatcctcctccgaaaccccgaactctctctccacctcaacctgcctcacccccctcgcatcagcaataagccccatcaacccctgtccaacatccttgatatcattgtactcatgcaagagcttggtataccgctcgcacgtggtattaggatcgttactggaataagcagtggttagagatggaagatgcaatgtttccatgttcttttagggccgtgtcctccatagctgcatgcaattgggagagctggggagtgtttacataagctgcgtggtcattgtagttagatcggcttctaaaaccgcatgcttagcttctaggcttgcaatcgaagcgcgaagggcgacctgcgttgaatgttagtgtttgatatgatagacacgggtggcggcaaggtggggatactaagaacgtacgattctttgctggtctttgtaggacttgggttccttggctgaatccatggagattgtttgcaattaggtgcatatgcatatgtgttgtgatacgtcagacgcaggagatgagagcattgtaagaggagggagttatccatgtcctccgtaccccagaattatatactcctgaccaatcacggccatgctgaataatccagttcaaggcttccaaggtttgtgcgtgcgcatccttaattttgctatgagtttttgttatttgttaagtgttaaatgatagaatagctatatcactttgactcgagagttcctgagaacaaaaagacattgttcctttgcctccacgcgtcgtttccgccttaatcggatgccccggattgggtttaactgttatccgcatctgttctcttctcccttgcaactccctctgaccacaccatggcatatctccgtcagtccttatggactttatttgtattagtggcctcggctctcgcccatggcggccacgaggctgttcctgagggcgaatctatctcccaggatcctatcgtacgtcctactacgccattcccctcggcaaaagttaacacatgattccaggatgcaacactatggactcatatgattctcatgggtttggcatttggcctaatcttcccaacgggaatggttctcggagtatgtaccgcttcactgacctctccgtttccttcctaccgtcacgtcacgtcccatctctaacaaaagaaaatagatcatccgttcccgctggcacgtccccgtccaagtcgtcggcaccgtcatcgccgtactagcttacttcctcggccacgcccacaaaggccgccaattcgacaagaacctgcacgcctccgtcgcaaactggctgatgctattgctggtcgcgcaagttgtcctcggagtatatctcaaactgcacctggagaaggcgggccaggcccgcatccgatggatcttcgtgctggcccacggcatcgtcggcaaggccatgcccgtcctcagctgggcgcaaatgctcttcggtggcattgccgcgctcggcttctgccgcgatgaccatctcggccagtgtctggcccatttcattatgggctccgccttcatcgcgtacggtatctgtttgaccatcctcttgctggtcggccagtattggttgcgccggaccggccgcagccaggaattcttcgattccctcatcatcgccgcttggggctgtgtcaatacttttaccgaacaccgctggggttccgcttgggtgcacaatgacctccagcatactactatgggcattatctggtggtgtgctggtctgctgggtatgtggctcagccgtactcgcagcggacgtcctaagcgtaacctcattccggctattgtcatcttgattaccggatatgctatgtcggcgcatccccagcagctgatgatcagtaccatggtccacactatcttcgggtacaccctgatggcggcgggtctgacgcgcattattgagatctcgttcattctgagggataagcctgctctctccgagccgaacagcttccaatacctaactcctttcgtatgtatactctccggttgatgtggtatataggatgatactgactcttttctctttcagttgctatatgcctctggcttcctctttatgggcgccaccgaggagcagatgctcctgctaaacaacgcaggcgtcacccacgtggcgtacgtgttggtcctctacagcattgccttcatcctcttcctctgtaagttgattccctgctttcttcttctagaacaatcactcatccttcccttcagtcgtcaacatcctgctccacctctacgctgtccacgcctggcccaactccgagtccaccaatcaggacggccccatgtactccactctcaacgggaacgcgaatgtgaatggccgtgcacgctcaaactcgcagcagatccaagatgccgaggcattcgagctccatggtttgatttccgatgatgatgagggcccttccatgggaccgcggaagaatagcgatgaggaacttggaaaagaagaggcccatcgctgaggccgtatattgattcgctggttcccttggcaagtatatcgtgcattttgtgatattgtgacggcgtctaggttgggttgggttcggatagcattgcaggtcctaaaaggccttgaatttgagtagctaatattatatctgaacaaaattgtacattattctcaattccatgaagcatcaatggttgctcgtgttctatcgtacataatgatacccggatctaagctcggaaaaaaaaaagaagattcgtaatatggtaaagagtcctcccagtccagtcccgcttattccaattgccttcagtgatccacggtaatcctacctggcggcacagcagccatatccagcgcaccaacatcagggaagaaaggatgaagtgaataaatcggaccaacgctcttttccccgtcaaacagcaacatattctgcagcggctgctccctcgccgagagaacattaataacatcctgcgccagcgcaccgcccaaaaacgccgctacgggactcagctcgctgcccaggttctgcaggaacgtccgcaggaacaccgagtccagtgtgagtggatccagcttcaattcctggtgtcggtctcgcgatagcttcgtgaatagttccaggtcttcatgggtgaaggttgggcggtggccgcgtagcttttcgaattcccacaatgcgcgcaggcagctgagcagtggggtgacttgcttgcggcgccttgcaagtcgggtgtattcttccgggagtggggaggtgtttgcgagaattagtggtgagtacacctcgcgcttggtgacgagctcgatgatcttgcttggttctttcttgttggcgttgttctcttcttttttcgtggttatgtcgatgatgctgcgggtgggtgtttcttgggttgcgggcgccatgttagatttgctgcgctcgatcacgaagtcgtggctgattaggtcggcgaagacgtagccgtagaagccgtgtagaccggcggcgtagaagggtctattggctagtcggcaggcggcgttcacggtaatgttggtgacgaagtcgagctctgtggcaattgtgatatcgaattgtgcgaaaaattcgggtgctttggtgctaacatcggatgtgtcaatgttgagcttgactcgagggttcattttgtggatttgcggtcctgcgacttgcgcgcgctggagtgggttgtcagcggatgcggtagggactttgctctgttgtagctcacgttctttccaatcacatcctgctcactttgcgctgcggcgataaaaaactgcgcgcccaggtcctcctctgtgacgtcctggtggtcgagtatggtgagtgatccgatgcctgccaagacgaggttcttggccacttcatttgcgagagctttcacagtgataaggaggatgttcgccgagcggattctagccgttgttaggacatgtagtgctttgcaagctggattgctcacttttcctgcgcgtgcactccccacagccggatctgtcggtcgtacagtgcgatttcatctggcaaagtcagtaaggattgaagcagattctagttattttccataccagcactgatggcctgtgtattatcttgttgctccgccatagtgtcgatcgagtacaatcttgcccaggtacgagcttggcgatttaaagcctcgcagttgtgtttcggggatctgctatcaagtgagaagcactggttcgatgacttaatgaggggcgcaatgagaatggaagttgtaaggttgcagatggaagttcagaagttcaatgatttcaaatagtccaagaggtaaagaagttccgataggtttaaatgtcaggtgacccgggagctactgtgtggggccgtggggacaaagaagtatacaacctcatgcggacgaggatatctgtttcaatatattcactgaatattgatagaatatgctagttagatggggatcacggacatattctcagaaaaatctcaacataggatgaattaaacaaacagttcaagtgtctgattttatgatatcattgtcttaggctagttataaatagaggctatatcaagtcaacaaatagaaatttgcataacacacgactcaatcagcaaataatacgaagatattcacaagtatgctctagctttatcgacaatgtcctctacaatactgtagagcttttctgcagaacttcccttcctcgtgttctcatatcagttttgagcatatgagttctaagtaacataatgatagttaggttgagaggtaccatcttctcaccaatgagatttggctttaagtattatctaaaaggatattgaccaacattccggaggccactttgtctttgatcctttatcatgggaaagtataaggtcaaagagctaagtgacacaattaactatcaccccatgccggatgaaggtgtctacacggagaaagaaagcacggagtgagaactgcaagattaatgaaatccaaaatccaaaatccataaatacaatgaagttatctctcaacctcccaccttcactccactatcgatgatataatcgaccatcacgtgttaccaaccttgtgaactcacaagaccaactcttctccgaaacactttattttaccagtacgttaatctttttgggtttctttgatttctgttgggttagttctaagacgctatctcctaccccatatccccaacccaggtaattccacctcaagcggtactaacgagcctgaacgatggtatgtctctcatggctatgcgtccgactgatgtctcacaccttcctttagtcagggaattacgattaccctcgtgcttcttcctcttcaacccgccgctcccgcatatcccgtcattctaggcctgacgagcgccctgacatcctccgtctccagcatctccgcaatctcgtatcggaacgaactcgctccggttcttacaacgcctacaacaccaactttgccttggaaacattaaatcgagaaatcgctgcgcattctctggaccgatctcgcgatcgtaccaaccttgagcaagctcgggccgacgtcgatcgccaactgcactccgagacaactggccccgcagagccaactcggagcatttggctcgaccagattcgttcagaacgggctcgaacttcgctctccccggagtcacattcccttcgccatcgtttgccctggcaaacgttccgaccgccaagcccggacggatctttatccaggtcaccgtctttcatgccaccatccggccagtcgggccgtgatggccaaggacggatgaagcgtcggaagctggacaccgatgataaccgcgaggaatttcgaggcttcaactatggtcaatatgggcaagtactaccgggaatgctgcaaatggaaatcgctagctgcgacggaggaagctacgatccggatagcgggtgttcgcgccccgagaacgttttggacaacaatacaagcgtgtactctaccagagaagcccgctgcaatttagtcctctgtcaccggggcgaggccccgttctgcttgaagaagatcgttatcagagcccctcaatgcgggttcgacgctccgtatgtctgccaggcgtgtctgtacgttggactcatgactaatgaaatgaaacagaatacaagaaggtatggtattcgtcgcgatgacctctgatgaactgcttgcccgcaccgcccaataccaaattcaatactctagcggccgataccgccgtcgagcccgccgcagtggcatgcaaccatcccaggaatacctcactgggttccggccaccacttcaaaatatcgaacgcacagttctcatgagcccacattcagccgctgttccgcataccgcagaagacccgcaagcgcagttccgcatcaccaccgagtatgacaataacgaagattctggagatgacgaagaaagttctgcatttctggagagaacccaagccgaccagatggaagatcctttatcgtctactgatgagagtccaagcgatgaggatgactcttcaagacaccagagtcgccgacaggttcaatcggaacgtttgagtgccctcagccgtgtttctgagcagagactacgccatagcccgagtcttgtgcatccacaccccctagccgagcctgctcatccaactgccgaagttttgaagcctcatgcgcgcttcttcatcgagcgagagaagagcatggttaccattaaatttgacccacccccgtatgtgtcattatcattggatgtggataaccgaattttaacgtttccaggtctggccggttcattctcatcaagctgtggagcccgcgagcccacgggaatattgacatagaaagcatcatcgcacatggatatgcaggtccgcggttcttccccagtctcgcttctcgttaacggtgggaacaaagagttttgatgcattttggatcagagggatagaagcaattatttctcttttggtgcatagtttttcagcccagactgtcttactaggtcaactagtaagacaacttatcatgattatgatatgactttcaggattattctttattctgccctgatttgttccatcgtgcaattcatcgagatcacactaaatacatttcgtatgtgggatcaaaaggtatgaccacttgatcagcctttaattagcatctccaataccacatttccaaggaatctttcttgatatatttcttgatagatgaataggctatcttctcttctcggccaccacagcgtaataggtagtagcatgtcgtttccaattttccatcaggctccccttcgatcaaggagaagttggcgccaattaagtacctatataggcccactggttgccctggaagatatactcggcttgcaccagcatcagcgcctggctttggaatgatgcgagaggagtctattggagggactggtttttcgtttgaataaacatggttgaggtaggaagatggtgagagttcactgcgagtgtactttggagtgtggggggctagatacgggacatagccctaattatttcaatgtaaatacctacggagtacaattccctgcatgctatcttaagatgatacatgccctccgaggtcctcgacacatatgttgtacataagtatctcttcatcaccggctacgacgtccgccacagcgacgacagcgagtgtaagacccctcaaccccactagcctagaccatatcgttgcatgctgtaccgccgtattaaatgcaacttgccatttgaagaaaggcttggtgacagcaatttggtgggggtcaagccacattatgttatctcttgacagggctagattcttatcgatgacagtgatcgacgccaaggtggttagtggggacgggggtccccggtgttccctcggctatgcgcattggtagcttgcagcttgatctaagtcaaattgcacctgtatacaactgttggaaggataattcaagtcgatattctccgtcacctcaaaagaacccgactagacatgtagaaatcttgcggcggattcgaaaaacagacaccggccgttcataggcgtatttgggatatcagcattattaggaaatatgcatcattgtgcatggtgaagatacgtgctggctgaatttcaggatcacgtaggttggccacatggagccgatccgtgtctcttcattcttatatcctgcgtggcgcggttagctagagactaaaagccaacctataagaatagattgtcaaaacgccctaaaaaaccctgaactggcgccatgcctgagccacaaacgttggaagtaagggagccaatctgaaatatgagcactaatgcacggctctagaaatggttatctcaaaaacggtcacctacgtgatagtcggaaaattcttgaatcggttgttccaaatgcatttgagcgcctgaccagcgccttcatgttgttatatgtgttcacatctgtttgtgttggcattgcaacatgtatactccgtacccgtgcgggaactgagttgtacttgacagcctcaaagcatggctaaatcccctgcatgtgttgactagtgcggggtggacaagttatcaaaattgcgacatcctcaaatagcttggggtctggttcggggctggtctggcagtggtaggacgacggaagtggtggacacgaaccaatgtacttttagaatagtagctggtccagccccggggctctcggacagtggaggtctccggtggccccgctatagtaaattgtcaaagtacggatgaagccattgccgctggcaaccaatgccggggtattgtgggatatcggacatggccgcggagtcaggaaaacaaggcaacttcaaggcgtcacttctctatccaacgatttcccgtggccctccccctggcgatgacgccaatagacccggtccgccgttagcctgtttggccaggcaattagtggaggagctaaacggctcagcgcggggctcattacgcatatgcaataggtgggaggagatcatggatgtatgggaccatgttagctgcagcgctagagtcgaaataaaagtctatcctatttctgatttgaaaggcgagagaaatagagtggatgtaagggagaggaggaggagaagaggaagctctttaaagagtcaggtgtccccttcccgctttcttagtctttccttctcccggtctctttctacttcttggcttcttccatctctctacttttttttcttctataatttatctgctttataccccttcctagcagacgtccttgctaccgataccatgcgtatcaccgtcaacgtcatccgccccgagcaggcggactcggacatcatcaacctagaagtgggcggcgatatgtcagtcgagctcctcaaagctattgtcgaaagcgaaactaccatcccacccgaagcgcagcagctcgtctacaacaaccagctcctccagaacccttctcaaaccctagaccaagccggcatcaccgagggcgacatgctcggtgtgcacgtcaccctccgagctccccagccctccactcgccccgccgcttccagctccgtcgcgcccagacagaacactcaaccccgccccggcatgccggaccccgaaacgattcgcctacacattctgggtgatccccgcgtgcgcgaggccgtgcgcaggcagaacccggagctgtctgaggccgcggataatgctcagcgcttccgcgaggtcctgcttaggcagcaacagggcgaggcgcagcgggaggcggagaaggaagctcgcattgcgatgctcaatgccgatccttttaatcacgataaccagaaggaaattgaggaaattattcgccagaatgctgttacggaaaatctacacaatgccatggagcatcatcctgagtgtacgctctacgtctttgaactgccggctaggctgctcaactgagaataaagctaaccaatatgtttctctagccttcggtcgcgtgacaatgctctacattcccgtggaagtaaacggccaccgtctaaacgccttcgtcgactccggtgctcaggtgaccatcatgtctcccgagtgtgcaacatcgtgtaacataatgcgcctggtagaccgtcgctatggcggcattgcgaagggcgtcgggactgccccgatcctgggccgggttcactccgcccagatcaagatcggcgagatgttcctgccctgctccttcaccgtcatggaaggcaagcagatcgacttgctcctggggctggacatgctccgccgccaccaggcctgcattgatctccagcggggtgctctcgttatccaagaccaagccgtccccttcctcggggagggcgatattcccaagcacttgactgaagagttcgaggccgaacctacggtcaagggagccgatggtgccgaagtgggtgcccgcactggcgcggtcacgcacaaagcggagaacaatcccaatgccaatgcgacttccaatgcatccgggtctgggtccggcgcgtcagggtcacagccccgaatcaatatccggcctgcgcctgcttcgcggtggccgcaggattccgttgccaggatcaccgagctgggattctcgcgcgaggaagccgtccgggctcttgatatggcacatggagacttggaaggggcgatcgggtttttgatttgatctatggatggattccgctttctgcatttacactcgaaggcgttttggtcgggatgggaacttgtattagcgagatttgatcaaagcacgtaatgatgtgtacgattataacgctggctgcattataatagattttgtttattgtcctacatgtaatgtaagtgtgtgctgttcattcccgcttggttttgggcattagtttgtcgcgtagacggaataccatgtctagagccatgaatccgcctatgaggtgttagtaacagctggtgagctaattgcgacattcttgcagacacccttggactgcacatacctaacgccatatagggagcatacagcatggtaagctgctgcttctccgcgaccgagcggtcagtccaactccacaccaccaccagagatgtcaatgtagtgatgaaggcctggataccgaacacgaggaggtgtacagggacgagggggtggtctagatgaattggaaattgagttagttgctgattgcgtttgccattgtcgtgtcgttcgtgttcggggagaggatattccagatattgcatttgatatagatatgtaatggatataagacgtgatggggtggactggatgataccatatacaatgtacaaatagtagcatgtagcgtgtaccaacacgagcttagaaaagaaatggaaatacctttaagcaaaccccggaccgcccatatcgagagcgggaggtggtacagcagctccatccagatgaagacggtgaaccatgttggggggtcttcaaagaatttgtcgcggtaggttgttatgtagaactggcgcaggtggtgggagaggtttgtttggagaaaagctgggaggagggggactgtgtcgattactgtattttggcgttagtgtgcatatacgaggtatgaagatatgaagatagagatagagatagagaatcatacggaggataatggggacatgggtgacgaaaaagagaagataggacaagtcccgtttacgggtgcagatggacatgatgtgctgggtcatatgcaatgcgaaaggataagacggtgctggtgctgtgtgtgttgtatacggagtatgctgtgtgtgtatgttgtgtgtggtcgaagtgtagatgtttaggggaaggggatatcaggtgacccgaggaacaatctggaagagatggaagttatagaactagaacatcgtataattgcttttttcgggggaatgctagtgtgagatcttaatttctagcgtatttcaccgagataaccaaagtcccaagtcgatatacacatccaactccttcgagtaccttgatctccatctcaccgctgcttctcaattttaaggtggcctgactggtctcctcggggagctgttgaatccgagctaccctatatccacaagggaatacactgaagtagacaaaggaccttgatgtcaaccatcaagcctggaattacatcatcgggataaggtaggcatgcagtgatgctacagggaatctccttgataacctgcctcgagagagacatcccgggaagtagaccgcaagatcgggatgccctaattagttgatgacagggttctttagggttttcctcgtttcttcccttttcttcccgtttctcctttctccttggagcttcctaaatagctcggaacagttgtaaatagtccttctaaccatatgccgaatcataatccccgcatgcatagatcatggcagataatgcaattgccattcggcctgcagcatgccttatcttcgaggtcttcatcatctaccgtagcggtgtaagaccatggaagctttggaacgaaatgaaaaaaaagcgggcgaacggtagtggaatggggatttgcatggcagtggataagtggagagacgcgtttattgcttttcttgctttattgtttttatttttatcgaaattttacttttcttcctggagagatcatttttctgacttctttttttccattatctctgaccgctgttcgcatctttccactcggagatgaagggaagcgttggagatgcgtatacagaactatatataaaatataaaaagaacctcaatcccacttccatctcttctccttatccatcttatccatctattcctttactccaccctatacagatcgatatacaatctatacaatgccttccacagccccccgccgtcccaagcagcccaagaagcaagagcccatcagctacgacatcaacatcccctatgtcgacgtagacaagcaatccaagatcacaaccaaatacccccaatacctcccctcctgggacccaatctggttcgacccactccagcccttcgaatatgaagacccagccctccgcgtgcgcaacaaatcaaaacccaacctgctgcccgcaaccgccaaagtctcgcacatccagcccagcctaggcacaatcatcgagaacgtccagctctccgagctctccgccgccggacgggacgagctcgccctgctcatctccgagcgcaaggtcgtcgccttcccagaccaggacctgatcgatgcgggcccagatgcccaggaatccttcatgcgccacttcggcaaaccaaactaccagcccgtgtccggctccatgaccgaccatcccgccttccacatcatccaccgcgacggcaacagagacgagatcacccgcttcctgcagcagcgcactacaaccaccctctggcaccaggacgtcagctacgagatccagccgccggcctatgtcatgcttggcctcctgcagggccccgaggtcggcggtgataccgtcttcgcggctacggacctagcctacaggcggctttcgccggctgtcacggctttcctggatggcttgaaggttacgcattcgtcggcgaagatgattggccatgcgcgcctgacgggtgggttggtcaggaaggatcctgttgatactgtccacccgcttatccgggtgcatcccgtgaccggggagaagtgtatgtttttgaatggggagtttattacgcggattgatgggctcaaggataccgagaccaagtgggtgttggatttccttatgaatcacctcgttgccggtcatgatttccaggttcgcgtgcgctggcaaccgaggactattgtgatgtttgataatcgctcgactattcgtgagttatttccacccccttttccctcccctggggaatgggaattggaattgagctttactaatgagatcttagactctgctattgtggactacttggatgatgataacggtgccaaggctcgtcatatcttccgcttggctgctatgggcgagaaacctattcctgtctatgaggatgaggaggacgaggagttcgaatgatcgtaatgtgatagaatggggttcggtgtttcgggattgattatagatttaatctggttggaatttgatttaacttgctttcatttgccttcatttacattcaaagattgaaatattcaaatatccattgcaatgatgatcagggctatactccctgtatccattttgactgtgaattcgttttcattaccaccccacgcctagagttacaagcagaaatcccagaaaaagcaccgatccttaaaagatcctatgtcaagtaaatctcaggagtcaccgccacgcagatctgcaacgctacatggccagtccccccacatcgccgcggcagcaaacgccacattaccgtagaatatcatcgatccgtgaccgcaagtcatgagcgatctccaattgttccccactaatgacaccgctctgttgcaggatcagcagcatctcagagacacgttcggcaacgatatccgagccgaagaccatgccgcccaggcgcacggtctcatggaaccatccactcagcaggtacagcaggtcgtgcgcgatgaatcgccggtttgacccgtggaagggcgcctcgtcggtgtagtacatcgtctccagcaccgcatacagcgattcgtgtgcaacgccaagatctaagaacagatccaccacccaggtagccgggcccacgttgcgttgaaactctaatgcataccgctccagcatggggacgagctcgcggatggggaaaatggtctcggacatgcgaagccgactgccgaggctgcggactttgtcgatcaccgcttcgtaaggttgcggtgagccgcgttgaacagtggcgtcatggatcccctggatcaggtgttgccaagttgacttgacgtcggccgcattgcgatggtcggcttggtagaagatttgaaggcagatatcatggtaactggcggaatcggcgtatttgttgaacagctaaaacatgttagtatcttgttggaacttattccgaaaaaattagaacttactgtgctaatatccatcactggcccatcgacctcgcgcaggatctcgggtttccgttcgggaagaatccgctcgtcatccttgagtctttgaagcaggtcatcctgaagattggccacgtcgatgagattcgaaatctcttgcagcagtcgctgtcttgactgacgcccgacgtccggtgtgaaaatcgaagcgttggcgcgggcttgaccgaggtactcaatacgacgactcaggggcaacacgaaagcactattggccaggtggaattgaacctgtgcagtctcgaagaaccgttgggattgggaatagaaccgccagagtagatcagcatggcctagatcatcattcgacttgcgctggaggtaggtgacgacaaatggagattgcgtctgcagcaaccgatcgctccagccctgctcgaggtaccagtcatacaaactcgtcaggaacacctcatcggtagaatcagaaatcacgccataggcttcgttctggcgtttggcaatagtggtcagctggccatcaatgagaccgggatcggatgcagccaatttgtcaactgcaagcacgactttgaaaatgagatcgtagcactgcttgcggaaatagaagtattccttgcgggggtcctgggtagttgtgagcgggagctgataccgggatccatagggaataagggggataagcacctgttcgggacgctgatccatgatccaggaatacgcaaggtttgacttgtcggaccgagcagcaacgttgagggcgagctggatagcacctaaagagaaaaggaataaccaatcagtatgagaagcaaaggccaggatcacacaacatacctgcaaagaactggttgaaaatgaaattgtccactgccgaaaccagataatccattggtaagtattccgccacctgctggaagagatgcagactctcattgagcaagttgcggcccaattcagtattggcaccggcctcagtcgcacgcttcagcatttcttgtgccttgaaaatcaccacatcctcagtactgcagaaactgccacagcgtcgtcgaagtgcatcagccacagtctcgacgttggagcccttggcaatgttgcggttaacaatgcccttcacgagttctttagcaatgtcatgtcccttgctggagctgaagagttcctcaaaggtgaggctgaggaacttcgctttcgattcagctggcaaagtcgccacaatctcatcaacccgctcatcaaatagaacaagtatgaatgagataccttcgattgtgtgtgataccaattgaacgagagagtgtaatgcgcggtgctcggcttgcagcgccacttcttcttgcttgctgtttacccgggcaagagcgtcggggccgttgaggccatcaataaaggtcttgttcaccttgaagaactctgccagtgaggagagatcatgctggacagtctgcagtttgctggaactcacagacgcggaaacggattgtgcgccattaggtccattgcccactttggcaatcctctccttccagatagatcgcaacagacgcgcaatgtatagtgcaatacccgtgtgtcgaggagagggttgcacggcatcaagagcagacattgagccatccgcaatagcattttcattcagatgggcccgaccaccttgagtaatgaaggcctggcgtgctgccgccaggatgtccggatcggtaattcgagtcagtctttggtcaggggaaatctccataccctggccacaagccaccgccagggcagttgccagcatctcgctccgtccatatgttctcaggaaagtttggatatcgccggtcagtccctcatggggattgccgccggtgcggagcaaggccgcgaagatatccacgagacgacgccgacgaatgatgtgaactccaccattagtcaagattgcaatctcggcagctgggtggtcgaattgaacggcaagctcgttggtcactggtgaaggtgccgaaaccagaccaatatcctctgccttgcctcccaggtctagaatgatagccgactcagcggctttaccactgaccgagccttcctggtactgagcgatacgaccagagtcaggggttgagatgaaaagagtatcaatcttttgctgtggatccttggtagtaaaacagaagaaatagccgggggaatatcgctcggcgagacgagtgggtgaaagtgtggtaatctgaccagcagaaggtaaaaccgcgccaagaggcgaaacgagtgagatggaagatgccaccccgctcacgccgggggagagatcgacgggaggtgtcttgacatgcagtgcctgcatgcttgtcggagggctggtgttggtcgacgcaggcgcccaactgtttgagccagtggcgctgagataaatgcgatatcctgttgctgtcgttgcaactagatgataccgcgacgcttctgtggctggcaccggactgatcgaaacaatcttgattctggggttcagggtttcgttggaggtgatgatgtgccctatgttagagtagatatccagagcgcgtttggtgattgcgagtgtcaaagcgccctcgggtcccatgtggaatactcgaattgtagatgcagaggagagtgtgtagagcagcttccgagtgtcatcgagtgccatctgcactacatgctcggaagcgctttgtgcaaggtttgtcaggctcattgaaggcctgaaagccgatagacgcgagctggtatggttgactctgccacagcggccctggaaccacctttcctcttgttggtaagtgacctcgtgcacatcggtgtcagacgatcctccaaagaaaatgcgtccagtggatgctgacgccgcgaaaacatttatatccaagccgcggactgccaccgacattcccgtgtgatacagagaaacctgtcgacctccgctgggcgtattctcatagcccattcccagcagaatgatctccgcagttgtcgcaatgaccagcaaatgggtgatcgcaggcaagaaaactcccgggcgcggtttggtcaacttaacagcattaatgctgttaggctgttcctcgaatcccaccaattgcgggttagagtgtgtgaaatcccaaatgtataatgcattgtcaatcgcgacccacgcgtgatttaactcggcaaacagacccatactggtcgaaacttgtgcgcggttgtattgatcgaaaatctggtcggggatatcgtacattttgactttttggaatggtgcccatgattgggatacggggatgttgtactcagacgaggagccctctgtttttttttgtcagtcttgcttcaagcagtcttcaatggggatatttacgagataaatagctgtcaaggtctggataacgcgattcgctttgcaagctgctattaatcgttcgcgccccgcgttcctcggtgctcaatgtttgatttttggacttcgaagctgctggagggagctttggcatgggcgtttggggttgcgtctgcaatggtgacctagtcggtaaaggccgtgctgtgactggtgccggggtctgaaagtaagctccaggaaggggtttctgcggcgtcgcaggagggagatttgttggaagagtcggatacgacatggcgacggttttaaggagggagaaagggacgatcccccgctagaaaacacaagaagctgcagtgtaggtcggacgagaaaaagaaagcaaaagatatgtgggggaatgacgatgagagaaggtcttgggaggagattggattattcaaggtctttgcgaaaagagagagtcaacacctgggagcgcacagaccaattgggatcttccgccttcacggtattgattgtcgattgtttcccattcccaattgatccctcaattgaacttgtttcctattgtcttattgtctaacgttttcaatcaaaatgttccaatccatccgtttttcttcgcgcctaccagctcgtctggtccggtggaattccaccggtccggtcctgccacccttgatggctactttgcggactgatctgaaaactgccatgagagccaaagatacgacaaggtagaggtccttttcacttctgttttcgaggttcagtaagcttataattagactgaatgtactccgcgctttgatctccgagaccaacaacgccgccaaaacctcctcgccgattcagacagacattcagctcttgtcgctaatccggaaacgcatgaatgcctccaaagatgcggcaaaggagtttgatgccgctgaacgtccagatctgaaggagaaagaggatgcacaggttttggtattggaagaatacgctagtcaggttcagaccctccccatcgccgatatcaaggtagtggtcatcgaccagatcgctgctatggtcaatgccaatacgaagcccaatccaggcaccgttctcaaagctctgtttgctgcgggaggccctctggatggcaagccagtagaccggaaagaagttgctactgaggtgaagaacgcgctctcttgagcttacatttaccagattgtatattagtgtcacaatagcctcagtcaagggcattaaaatctcattcataatacaaagaactcctctccaacgccagcctgaaatccttatgaacagaagaaagctactcctccaagagaagtcatcagaacacccaaccaccaccatcggtctggattgatcagctgttctctagcgatcagctgaaatcctgcctttgacgagagttctcgcttttgcttttgcttatgcccggttggtatgggattcaatgtcgtggtagggagcatctttggtggctggtaggcgaggaacatgggatggacaagtgagccgtccatcctggtcaaatcgaggcgtttaatgcgattgaacttgtcgatgtccacggagaattcctgtcttatgtcagataagccgtctaagagaacacgaaagaaatgtacctgaaactcctcggtgatgttatatcgtgtgtactggcctgcctgcttccggcagggattggacagtagctgacgaccatcgacagcaattggtgtcaatatcagcgttccgttgccgaacacagtataagcaccatgttgccattgcatgactccccccgggcatgatgggtcagccgctgttcgatattaatacagcgtccaaagtctagatccatggagaactgacggtttgagattgcgcgatagtatgcggattcgtaatttccttcatcatcgaatgagtatgaaatgcctgttagattcggctcgatcagtttgtcgttgagtggatcgtagaatccctatgcgcgttagtctcgagtcattcatatagtgtacatagttccacatactggaccagtaagaacatcacgagatttggtagtccacgttccaaacaaatcacctgcactcgccaaagcggctgtgactagaagactccaaatcaaaaacatcttagttgacagagggaaaatcgacagaaagggagtatttgaagggcgccctttattggggtggagatcaacaacatagttcagcaaggccctggaatgggaagggtttgatgatcgaagatgtacaaggatcatttgtctctattaacaatcataaaacatacaatggctctatagtgtagtacatatagttatcactgtagttttgagatgattccatcctattggaagtacccgcttgacgctttttccggtttatttttgtaatttacttcctcgtttacccgtggacttgataatccgtcgacaactatcccaccagaatggcttttcaggttgcaaagcgcgaccttcgcaagaggatgcgctcaatcctgcagggtttgtctataagcacaatcattcaacaatgtcaggtcgaatggtggtccttgggttgtccataactaactttgtcccagcaagcgcagcaacaaccaatttcttgtcattgcccgagtaccaaagcgctaaaagcatcgccgtatacctgtctatgccaagcggggaactctcaacaaatgggatcgtaaaggatgctctacagcaagggaagaacgtctatatcccgtatattcatacccaggataaaaaatccatcatggacatgttcgcgctgaaatccatgtccgagttcgagtcattacagctggacaaatggggaatcccatctctcttgtctacgcagattgaaggtcgaccgaacggattgacacaaggcttggatcttattgtcatgccgggcatggcctttgaccacgggttccgacgacttggtcatggcaaagggtattatgatcattttttaacgcgatatgcaacaacgacccgcagtatgccattcctcggtaagtaaatcccagaaaaaaatccgtttatcccgactgaactccattgtagttgcccttgctcttcaagaccagttgctcgccgaggatattcctgtggtggagcatgattggttggtagatgcgatcgtggttggtgatggtcaattcttagaccgcagggtgtagcgcaaatcgaaacagaaaaggaaaggcgaaaattcaaacagcctggatcagagagacattgtctcccttgagaaggacttggcctgttgcgcattagctgtgttcacatagactttcaatttcatcgtacctagaggccggcgcttctcttcctctgtcttggtagccagacgcacttcaacggcatcgtcaataaccaggttcatgaattcatcaaagccctagcacaggttagctcaaataacaagcaaaacggtatcctgtaaagaaacacatacgcggatcttcccctcaatgcggaaagcgagttgctcatacagccagactgagacggtgctgcgtttctgcaggagactgaaaatgaaatggatcggagccaacaatgtcttgcggcctgccatgatgtgcggttatgtcgagagtgatagctgtcacgcgggagacgaggcgaagaaagctctggcgggcctggcaggcgtcccgtgatttgattacggtaatacggttatctggtcacggccaccccatcccaccatcaacttgctccccctcctcgaacgcgtttccgcactcagatgctgatactttcttaatatattgctgagccttgattaatctatttagttcaacatggccagcaaggaagccgggcaggcattcgccccggtcctggcggccgtcgcgacaatgcaaggaaatgtgtctaggactgagaagactcaggcccatgaattccttgagaaattccagaaatcggtacgattctttcgccgagacctaagtggtatcttttgttaatttcaatgcgtttttagattgaggcctggacaaccacacatgctctattacagtcccccgatgtgcctgtcgaggctaagctgttcgccgcaactacactgaaaggaaaagtaagggtattcctacctgaggagtttcgccgtttctaattgcgcagattattttcgatctcgatcaactccctccggactcagtattggccctgcgagactcggttctaaacctattggttgcatttgcgccgggcccgcgccctattcagacccagctatgtgtgtgcttggccagtctggcgattcagatggtcacatggcaggatgtgttggcgactgtcggagcagctctaggaaacaccgcaggggattgtgtgctggaattcctgaagatcttgcctgaggaagtcaccgagggtcgcaaaatcaatctcagtgtatgttcctctaatgcgtttacaaaagttcaagctgacatctacaaaaggaagacgagttgctcgcaagaaccaaggagctgctagaagacaacgcggagcaggtcatgcagctgatgatccaatacgctcagtcgtcgcgtacgtattcgacggccacgtcccattctcctgccgaattaaattccataactgaccatgaacagctgccgccgcaaccaacccccgtcttctcgactgcattacctcgtggctacgtgaaatcccggctgccaggatcgttgagtcacctctcatggacgtcatcttcaaagcgctggacaacgacgcatctttcgacgccggtgtggactgcgtttgcacgctttaccgcgacacaaaggacgtggacgagtcattgcccatcattcaagccctttatccacgattgatggcacttcgtcctaaagttgctgaaactgcggaggccgaagatttggaggctttcaagggtatcacaagaatgtttgcggaggcaggtgaagcatgggttgttcttgttgcacgtctgccgagtgacttccagggactcgttgagacgcttctcgaatgttgcgcacgggactgggagcgcgacgcagtgtctctaactttcattttctggtacgagctgaagcaatatattgctctcgacctgtacactgacgctcgagtcactttccaacccgtctttgcccgattggtggacatcatggtgaaaaacctcgagtttcccaccccggaagacggcgaaaccgaggacctgttctccggagaccgcgagcaggaggaaaaattccgtcagttccgccatgcaatgggcgatgtcctcaaggactgctgtgccgttgtgggtgtgaatgattgtcttgctaaaatctaccaactgatccagcaatgggttgccaagtatgcatcgcaatcaagcgacgaacatgttcctcattggcaggaattggaggcccctctgttcggtctccgcgcaatgggccgcatggtcgacccccaagagagcaccattcttgggcagttgattcctctgattgttcaaatccccaatcaggagaaagtgcggttccaggcgatcatggcgctggcacgctacactgaatggacagctgcccatcccgatacattggaggcccagctcaactatgtgatttccggtttccatcattcctctcaggaagttgtacaggcctctgctcttgccttcaagtttttgggaactgactgccagaagttgctcggtggtcatatcgcgcagcttcatgccttctacgagtcggttcttgacaagctgaagcccactagccaggaggaagtcactgagggtgttgccgcagtggtttcggtgcagccccaagagaagatctacgattcatacaagatgttctgcgacccaatcatggcccgaatcatgaaccttgccaataatgcgcagactgaagaaggacagcgagccgtcgcggatcatctacagctgatcactatctttgtgcaggtggtgactccgattcttgcaccgggagaagaaaaccctgcggtcaaatactgcggtgagattctacccatcatgaccacgattgtgatgaactttacgtcttctacgcctattctcgaacgtgtgtgccgatgctggagatacatgatcatctcttatcgcactgacatgatccctcttttgccgactctggcccagagtatcgcgaacggattccaggcctcgcgcgagggttgcttcctttgggctaccgatgcggtggtgcgcgaattctccgatggtgccgagtacgtcgaccaggctaccagcgatgccgttttccagttctatgagcagcaggcggttgctttcctgcgaatcttgaacgatctccccccacaaaatctgccagatgtgattgaagacttcttccgtctctcctctaacgccgttcgatactatcccaagaagtatatcacttcgtcccttgccgtccctatcttctccgctgcactcagtgctctcactcttcaacaactcgaccctctcatcgctacgctgcattattatcgggatctgttcagctttgcatttgataagcctatggtctcccagttcaccagcccggaaggtcagccttacgttaacccgcctgaggttcgcgaggctgtcaaggcgttgattatctcgcaaggccagcctttggctcagcgagtcttgacgggcatgatgttcacattcccgggtgactgcttcgctgatgcgtcgggagtactgatgacgatgttcgaactgctccctcaggaaaccggggcatggctgcagaccactttgcagatgctgccgagtggcactatgaagcacggcgaagccgagcgacttttgaacagtgtctctgacaaagtccagtcaggagagacccgcaaaatccgtgttctcctccaaggttggtcccctccccttccctccccttgttctttgttctctaatctaacctcatctagacttcaccaactcttaccgtcgccgcaatgtagccccacgcgagggccttggccgtctggaggccgcccgattccgattcagcggatgagaatgccactgtaaattcttattgagtgctgatctgcactaaaaaagagaaccctatggaagcatttgcacaaatcaggcgtcagttccttgctattgacgtgccacgtagtacgatacacgatgggatggcatgaactcggtgtgatgattaatgacctgctggtacatcggcctgaccagaaccttttctggctttgacattgccatatgttgtaccagctcgacctgtatctaggtattcaatagtcgcgactcatttctgcattgagatgcgttggcgcactttctgtgtgtgggcatttgatcatgatcatgagttatgaatctattgagcatcaatattcgattggcataatccgtatatatatcttaggcgtagagtagaagggatctacatgtatattcattctacatatcactactagtagtatatatttagagaagaatagactatattccttgcaatgctatatatacacaacctacaacacatacactccgactatctctcaccaataaagtcatatccacaccaccccaccgatatctccgcacttcccccggacaacccgtttgaactcccacttgcgcttcattctgtgactcatttctgctccctaaccattggtccttcctttggtgctcagacattcttttttgactccaccttccagtgatcatcgtgtcatggcatgaaatatggagaacgacggtcaaccctccaagagacggcgacgcagtcgcaaagttctctccgatcgtaagttcgaatgcacatttgaaggctgtgggaagagttattctcgcgccgaacacctgagtcgccatgctctcaatcatgccccgaaacaaatctatcgctgcgactttcccaactgttaccgatccttcgtgcgacaggacctctgcacgcgccatcgtgaacgtcacaccaccagcggttcccagctccagaaacgtgatagtttcgccgaaaatggcaccaaaacctcctcgccttcttcgcctgctatcaccgcgcccgaatacttcgttggctcggaggatcccaaacctccggtgacaacataccccctcaccaccggagtggatagcaatgagataccagtggaccaatattcggattttcaggcggtactgccccatactgaggatcttatcgaccttgactccatatcctacccgattttcggcggggaaacctataaccgatcaccattcgccatggcagacgattttgcggcatggctattcagcgagccactcgcgccgttgggctacgggatggtaccacttgctcagaatcagttctacatcaacgaggctgtatataacgacgacaacttttgctcagtgattccacaacatcccatgagcgtgacgagtattctggactcgggagcaccgccggctctcatatcagaaggaaagcgtcaggagttgctgcacttgatgtcaacacgattcaatgaatcggcgtatgcgtcaggcactaaacgcaaagatgcgctgatggacggggatttgaataacgaccgacatgccttgagcttacgcatgatgcagacgtacattggatcgtattggtttcacttccatgcacaactcccaatattgcaccagccgacattcagtgccgatcgtaccccgaacctattactactagcgatcatggcaattggcgcggcgacattggataagattcatggccagtctgctattgaagcagcggctgaattggcttgcttcattgcctggcatttgcgttgggaaatcttcatggatgcggactttcggccgccggcgaagctttgggtgttccagtccctgttactactggaagtttacgagaagctcttctctacacgcgcattacacgaacgcgcacatattcaccacgacacgacactcacgcttatgcgccgaggcagttcgctcatcggtagttcttcatttgctaccccagaaaccaaagaagaagacgagtcatggtcagcctggatcaaggccgaagcgactcggcgggtggcattcgccgcctttttgttagattcaacgcatgccataatgttcggtcactcggccaaaatggtggcccacgaactacggctgccattgccctgtgacgaggcgctgtgggctgcgacaagcgccgccgaggtcgctcgtgtacaatccagtctgcagtcgcacggtgtgcgaccaattatgttcctcgacggcctcaagcgcacactcaatggccagcccgtccggaccaactcgtttggacgaattattatcatgtcgggcttgctgagtgtctgctggcatctaaaccagcgagacctgcagattagctcgctcggtgtgggccagactctcggcggacgagataaatggcgctcagcactccttcgggcattcgataactggcgccgcgacttcgacgaagccctgggaccgtcgaccacatcggagtcgcgcaacgtgctgcacgggctggcccatatgggctcccatgtcgatatagccgatctgcagatcttcgcaggtgctggccggttgatgggccggtctatcacagcgcgtgactactttgctgcacgggaaaagaccgagaaatgggcgagaaaggcttcagcgcgggatgccacgttcttcgcgctcaaatacctatctgcctgtttcttagacccggctacacaccctggggagtatgctgcgcgcgatgactacgtgttaaaccggccgtgggtcatgtatttcgcagctctggtggtgtggacctacgggtttgcactggacggccccttgcgtccttcccctaccctcctgacgttagcggaccgagagcgcgacatgcaggaatttctgcatcgcgtgggagaaatccaggaacccaacgaattagaggccatgaccgggcgcaatgggtgtctcggcctgctaatgattctccgagactcctttgccaaaccgcgatgggagttactgggagaagcggcgcggctgctggacagctgcatcgcaaagctgcagtcgtagcatgtatgaatgtgtttatataccaagagatgacgtttctattattccatgatctggccagcaatagaagtatacaaccccctaaatacgcccccctgtagcggttgccctaacaaccaccgccgatcccacacctagttccccccctcgaccttcacctcccaatccgcatttttgtttccaatctccaatctccaatttcgcaaactatccaaccaaaatggtaagttcccaaattcctcactgttgatagacttcctattcaagcggtccaaccgcaaccccttcccgcccatgtaaccgctcgccccccggatttcctccccctcatcaacaactgtgtcaacaaggcattgccagctctctcttccatcttcatcatggctaataaaatcgatcaggcatccacaaactacaaggaagcgttctcgctgttcgatcgccgtggcactggccgtgtcgctggtgacctcctcggtgacctgctccgcgcttgcgggcagaatcctacgctggctgagattagcgacttggagaagtccgttggcggcgactgtatgtttttattctttgatttatgtattagttggacgcgatcgcgtctgactatgaaaaaggaattcctggctaactctctcgttcgctgcagttgatttcgactcgttcctgaaagtcctcaaccgccctggcggtttccgtgagcccggcgagccggaggagtactgtcgtggattccaggtctttgataaggatatgaccgggtttattggtgtcggacagttgcgatacagtatgttttctgtttttgtcccaggcaattcggtttggttggtcgaaaggatattgctgacattccacgcttgcagttctcacaaatcttggcgagaagatgtctgacgatgaagtcgatgagctgctcaaggctgttgacactagctcgggcgagattaactacacgggtatgtttcgctgcgcctagagtgggctatgtgctatattgcatctgctaactctctccagatcttgttcgtactatcctcgccaactaataccccgatatgattaacgttcgatatggaaatggctttgccttggtggattgaaattcggcgcgttggaaccttcgtcttgtatgtttttattatcaaatacactgtattatgctgctccggggtatcgccttccgtagcgcgtagcgcatagatatagatatagatctaatctacatctgcatctgctagattgatcgcacctctataaactccactcccatctaaacaacccactccctccactccctctccccaaccccctcaccccccaacttctccgtctccaccacagccccaggaagaagataaacagccggcggccgctcctcctccccctcctcctccccatcccgcgcccctcccctctccctctctcgatccccagtagacgcccaatgcaaccgatccaaataataccccacaacaaccttgcaccgcccacacctcaacagaatcctcttctcgatcccgtcttcgcgccggataatcgtcgcccgccggtccgggatcgtagtagccagcagaagcgtcgtgtggttagagacatgccttgctcttgtcttgcgcgatgacggttctgtttctgtggtcctggcttcttcttcgaggtcggcttctatatccgcatctgcgtctgcgtctgttgagctcttgcgctcgaggggcagaatcagcgctttgtcttttccttcgccgccgcgccgcggtagggtgcttatgttgcgggttgttgctagcaggaggtggttgcagaagcggcaatgttgggtttggattgggagacggtggtcggtcatttttggaattggttattgactcgcgcttttgaactgataggagtcgggaatttggagctgctgcgcggaggcagattgatctcttatgttggtgatgcagagctggggtcttggttagtcttttgcgcggggttcatgaggaaatatctttctgctggcttagtaggtacttaccggtgattggatacacttgtttaatccgagactctgtgttgtcttgtatgctgaagttctaaaatgagacgatctagaaaaagagctgttgagttgcggagaattgcagaatggcaaggcggtgcgcttatcggtatctacagctaaccttggaacttgttagctacgatatagacagttcaagtagaggagttattggcatgctgctcgttattcatgagcacaagatacgcattcggatagctctatataatttaataggtatagtttatagccgttcataagccccgatggctgtaaatgctacgcaccactttacgccagtcccaaatccttgtagaatgcatcggtccgaggcgcacggcctaagaactcggtcagagtcttcatctcatcctggctaccacccttctctagaacctggtagcggtagcgacggccagcagccttgttcatgggatcgtccttgaagacggtgtagaacatgtcggtggagtaaacttgggagctgcagagcgaaatcatcagtattcgaacattgaaaccaatcacacaaacttataacttacctcaggtatccgtagtatccagcgtcgtaacctccgatcaaatgtccaaaggtcgcctcgccgtggccccactcgtcgccagcgccctgtacttccggtccgtccatctgggtaatctcatggcggagacggttgtatgtcgcagacagaggaagagcctcaatgtcggcgtgggtcttgggctcgtggacggtcatgtcaaagatgccgaagtgcagctggcgcaggttgaatagggagtcgttgacgtgcttggtgcgaatcaggttggcaatgacatcgtccgggatgcgctctgacggctggctggtggcagcttcgccctgagcctccttccagctagcaaggtactctggggagagggtggagtagtgtcggctcagagagcgcagctgcgagggttcccagcaccagttctccagcatctggctgggtgcctcgacaaagtcgcgcactgtgctggtaccgtggaagcgggagtagatggttcgggacaccaggtcgtggatgccgtggccgagttcgtggaagagggtcacgacctcgtcgtgcttcagcagactaggcttcttgggctggggcttggtgaagttgcacaccaatgcggtggcagggaatcggcgggtaccatccttattaatgaagcccggctgcaggttgaagttggctgcatggccatatttgccctcgcgagggaacaggtccaggtacaggtatccaacgaacccactgcccgcgtcctcatcgttccacacactgaatacttggacatcctcgtgccagacaatgtcattgccctggccagtgggggcaatggctgcccggtcctcaccaatgatctcaacaaactccagaccgaacagctcttcgaaaatcttcagcataccttgaatggttgtctgcaaggggaaccactcagcaataagctggtggtctagcgagtagtccttttctagcatgagacggtcatagaatcggtggtcccacaggtagtagcggccatcagcattggggtccgtggcgttcttcaaatccagcaacttctgtatctccttcttcccgccagcggtcagtctgtcccgaagatcacccaaaaacttgttaacggtctctggggtcttggccatcttgtcctcgatacgaaaggcagcgtggttgggatagccgatcagacgagccgcctcatcacggagtataatggattcccggaatagcggcacattctggttgcacttgttctcattggcgatcatgacttgccggcgagtctcggggtcgctggcatatttcatggtggggaagaggtcggggtacttgaacgacagccagagcttgccggcgttctcgtcctcgcccttcttcaggccgtccagaaggtccttgggcacaccagccagctgctccggggtaaaccaaatgccgccgttctcctcgttcaggttcttctggaattcaatgctcagctggctcagccgcttcttgatctccttgaagcggagccgatgagggccatcgggcaggccgagtccattacggatgaagtccttgtgttccttctccaatagacggcgtgactccggatcgagaatctcgttgcggcgcagtacggcatcgaccaaattgaagacatcctcacgcatgaccgcctcaataaagaactcatccatcagctcttcggccttggaagaagcatctcgcagcttcgagtctgttgatacagcctggtagaagcccaggatgtgtgactctagtcccatctggttgtcatcttgggcgagaggaaggacaaccttggcaaaggttgcggcctcgggcttgacctccgccaccaccttgtcctgaatggctcgcgagctcttgatcaagcgctcggcatcagctagaagtgactgcggggttgcggtaaagacaggcggggcctggggtggcttccggaggtgagcgggggccatgctggaggtcgtcaagagtcgtattggtacgttggtacgtaagtggcccagcgcgtatgagaagcgggcggggagacggaggaagggcgccacgatgaggatggcgaggatgacgatgaggagatgaaaacgagcggtgaaagcaatgatgggcgggtttgaatgcggtgggggaaggacacttggagatatgcagctgtcaggtgatctgaagctggtgattgcggggacagatatctacacttcttggcatttgtttctgcacgtccttgaattactctatatactaccaatagtttagttattgcatatggggtaaaacagtttatttgcaaagctaaataactagttaactaggtgatgtcataacttactaatgtataggttatttctaaccttggagctagaataagtagaaagttaaggaaaccacgtattctgccatgttacttctaaagtggaggatggggcttttgccaggtgtcaagacaatgtcgactaccccgtagatcagatatcccaacataataataataggcgtccggagtatcccgtacgcagaagtgacatgtgaaaagcaccgccccgcacttcgctcgctccaacctacagctcccctcagtttacaacataataaatatttcaagtcaaaatgatccaaatgaatatgttcatataggaatgaaaattcgtttctaattcatgattatctatgaagtgcgtcacaggtcgcttttgatgaacgaagaaagaaatggaaagaaaacgccaactccgaccaacccacaaatgcaaaaaaaattgtcatcaagttcagtttaagctgcatcggcagtggggattggctcaggcatcttagtgacctgttggccggcccggatgatccgctggcctgtctcgtcgcgcacatattcggagttctccttctgagcgcgcttccaaatctcaacctcaccgccgccacggatgactccgacacgcatggtggaaagcaagttgtgagcaccgttggagtggtagtaaacaccaccgttgaacatggctgtggcgtccttgccaaggccggacttgatcatcgccttgccaccggggtggtccttgatgaaatcggttacgtcgtgaacaactccggcaatagagatgaggccacggccgttcttggtctgctcgacatagtcctcccattccatgacgggaagctggtccaggggagtaccccagtcgagcttggcgcgcttctggtcgatcttcttctgcaactgctggacgcggcccttctcgatttcgttggagcggaactgcttcaagtcgtaggccaggccgagctgcttgcagatccaaatggtccacttggtggggtcgtactggtgccattcgatggcgttacggtagtcggaggggaactcgtggtggaagttgtggtagccctcgccgagggtgaccagggcggtgataatgtgatcacggggggagttgcggtcgtcgaagggctggtcgccgagccagtgggccagggagttgacgcagaaggtagcctgttgcacgaagaagatacgcagaataccggcgtacacgaatccgccataccagtcaccccagccgagaccagcgaccagcatggggacgatgagacccatggtgagcacgaccttgatgtagttgcggtgttgccagacaacgacggggtcttcgttcagatcggtgatatcagtgcggccaattcgcttggggttctgcttcatgaccatccatcccaggtgcgagtacagcaaacccttacgcacggagtaagggtccttgtcggtgtcggtgtaacggtggtgagcacggtggtcccgagcccaccaacggatggaaccttcgacggcaccgccgccgaccagagcgagccagatacgcaggggcaaggtggcggaataggagcagtgagcccagagacgatggtatcctgagaacggagtcagctcgagtcaaaggagtatacttctaattctgaactacttaccagctgtgattcccagtccagtgaagaagtaatagatgacagcccaaatagcagtcttcagctgcagaggcacgaagaacgcctggatgcagcccgtgaggggaacgccgatgatgaaagtaacgttgagccagttgacgtgcttgtaccagttctggcgagtcatctgggtatcagcaatgtgcaccttcttggtgtcagccgcccgagggcgtgaagcatccagcttggacgacatggttgatgtgtagaaggttggatttcaatccaggaggaccaaagggttttttatactagggcccacttgggaccaacgttggggagcctgggtcttgatcgccaacgtatgtgggaggaatagggctgaaagacgaatcaaatgaaagcaaatgtccagcgtcacgagatcccgaggcgaaaaggaacccgaaacagaaaagaattgccttgaaagcctacgctgggagacttttgcgcaaccctttgctcggatgtggcgtgcctcatcgctttctggcgaatgttgggtccagccagccccaacgctttggtgcctcaggcagtcatggccaatcagcgcgcgacggcaaatatgtttatgtcagcgctactcccagcagagtgggagccacgggtgaaggttaagtccaccaacggttatatttaacctcgggatttctaggaattatgctgctttcatccaatgacgtttcaccaagaggtaacattaataagacgccgcatggagctacatttctagttaacctacggttttcccccggtcgcctccttccctcaggcagagaattggcaatcgtcatacaataagtcatcgcacgttagagaatgtgtgagaatcgcgatgcgtacttgggcgaatcttattgaatgatcgaattctggtcatgtcttggccacccatcttctcgatgccgatcagatcaagttccgacgacgcgtatgcaggatgtgacagggaaatatataccacggtgaaaatcgaatgtagtgtgcaatcacaagctaaacaaaaatgcggatatagcgtgaaatcataagctaaacgaaaatgatgtcgtgttggtgtagaattggtatatcgtcatggacacccgttgagttaaacattgttgaaagagaagaagagtcgatgaaaccagccagtggcccgtggggatatacttttctggaacacgcgggatatccgagcctcctgccaaagtatacatactgggtaggtacctcgatgtactccggaggtatgaggtgcatgtatgaccacaggaacaaatcgagataatcacaacatctgatctcatatgatacatatcaccacatagtttcgaatatccctcggtatctcataacagtctgataagaacgaccaggaagccgacgtgaggtctgactcctaaggtcggagccttccacctcgtatactatggacggcaccctccgactgccagatcttagataaacgaagatagcagagaacgtttgatgatatccgggttgtggagagtaaggcctcgtgtcaggatacgtgtatcccgtacctggcaaactgccaatgtccctcctgaccaatgagatcccctcaactggccccattctccatctaaatacacagccgtgaccatcccgaaacacataatatgggggaactcgggccctttgggctaaccagaacaaccatgggccttcctgtatccttatctttccccactcggccctgattggctggcctcccaagataaagcaggggccctaacgcgatccagacaagcggccaccaggttatgcgatgctcttgctaattgtcccccaagtgcagtctctaattgcctggctgccggtgcgataacagaacctgtcaggttatcccttccactttggtggacggtggatcccatgtgttcttagtcagcgccccgaattttgaattttagagttaccgaagctcggggtgtataatttttttttttttggaaatttaaatataaaacctctgtcccggtgggatagttcaatatctacattcattatatcgaacattcactatggacggtccagatcaaatcggccccgatcattcgcccaagcgcacaatcagcgacagactgcgctacacggtcaagaccttcactactcggtatggcttcaaatgatgtgttctggaggggccttgactcacaatcaacagagagggcctactaggagagtacgactatggatacctcttcatcccacgactgccttttacaaagcgagctcgcaaatctgccccgttcttcggtctcgaagatcgcgtgccagtcgttctggcattgattctggggttgcagcatgcgcttgctatgctggctggtggtgagtcccagagacacctacaatatacaagcaaagactaagagcatcagttatttcaccacccattctgctcggcggctcagccggtgccaacttcggggatgaactctaccagtacctcgtttcgacttcgttgatcgtctcgggtctgttgagtgctgttcagatgttccggttccatatcaaggggacaaaatactatattggaaccggattgctatcagtcgtcggtaagagcttctcaattcttcagatcctcgcttctgatactaattgttcaaacaggtacatctttctctacaatcacagtcgctcaaggcgccttcgcccagatgtataaatcgggatactgtccttcatctccagatggatctccgctcccctgtccaaaaggttatggcgccctcctcggcacctcgtgtctctgctctctcctcgaaatcggcatgtccttcatgagcagcaagatcctcgcccgcgtcttccccccactcgtcaccggcccaactgtcctcctgatcggtgcctcgcttatcaagtccgccatgacggactgggccggtggcgcatcatgtggttcggacccctccgcccgcgcattgtgtcccagcgctagtgccccgcaccctctcccctggggaagccctcagttcatcggacttggattcctagtcttcgtgacgatcatcgtctgcgagcggtggggtcctcccattctcaagagttgctccgtcattgttggcctgttggttggctcgatcgtcgctgccgcatgcaactacttcgagtccgccggtatcgctgctgcaccagtggcttccttcgcttgggtccacacgttcccgctgtcggtgtacccgccgctcatcctgccgttactcgcgctatacatcgttatcatgatggagtctattggtgatatcacggcgacgtgcgatgtctcccgactgcaggtcgagggcgagaccttcgattcccggatccaaggtggtgtcctgggcaatggtatcacctgtctcttggccggtctggtgacgattagccctatgtctgtcttcgcgcagaacaacggtgtgatcgcgctgacgaaatgcgccaaccgcaccgccggctactgctgctgtctcttcctggttatcatgggaattttctccaagttcgccgctgcgctggttgcaatccccagtcccgtgctcggtggcatgaccgctttcctcttcagttccgtggcagtcagtggtctgcgcatcattggatctgtcgaacccacccgtcgcaatcgcttcatcctcacggctagtttctccattggaatgggtgtcaccctcctgccggcgtggttcacttacttcttcacctactccggtgacaatcatgcgctcgctggtctgatcaatgctgtcgatctggtcatggagaacggattcgctatctctgcgcttctcggcatcttcctcaacctcttcattcccgaggagcctgatgatgtccccgccatcttggagtcgaccgactccaatgagacccaggtacagaccaacatgcctgaacagtcgtcgacgactaccaaaatggcttgatcttgcgagccttgtatagttcagtcatataatgagtttgtggggccatcattgccctttttagcgttatttaatacctacaatgcaactttacgttgatatcccctgatattttcctaccctctccagtatctaccaataaaccctcaacctaaaaatcccaatatcaagacgaaacccgcgacttaaaaaccggcctcggctgcaaattagcactagccgtcaaactattctcattcccaaacccaaaacactccctctccaactccccgatatcgcagcgcacaaacccttcatcaacaagcacgcgcagcacagtaagtatccacactcgacacgtaatccccggaattgcattaagacacccatcataactcctcataatctcatcgacacgcgcatgcgtctccggcggaattctcgcgatctgaataaccacgcacaggaaattctcggcgaatatcgacgccgtcgcctcgtgcccgggaatccatccggcgccgatgccgcgcgcgtggtactttgttccgcctggtgtggtggctgtgcctttgtgcaggtagaaggcccagtggaagtcgttggggaggggtgggtcggagcgaatgtagaggattatgtggagggtgtttggggggagacccgctaggctttcggcttgtttttttttggtttcggtgggggtttgttttgtttcggggtgtgtttggtcgggcattttggagtggtatagatggattaggaattaggaattaatcaaatggaatggaatgagtaatttgaggatggtgaaatgggatggaggggatggctgccaaggattgagaatacagctggatggagggctgttgggctgattataactactactgataatggggggaaaggtagaagcgctgagtctgaagccctataactgtataggctgactcgtgacacagatgatgagagtctagagaagagagagagcctctagctacccgaactaggaccttcactgccagtaataagccttcgggccgtctttagtggaatagaatgtttgcgttcgagctgcaatgaagggacgctgggagtggtacaacgctggcaagtattaggattatataaactatactactattatggaatttttttacaccccctcgaccttctccccgggggccaacatcttaatataccggtgcaccccggtctcaagaacctcaacagaatccccaaccctaaccacaaactcctccttcgcaggaacaagctgcatccctaaacacgcattggtccgatcgccatcatcaatccgccgatacgactttagcgtccgatccggctcagcattatgtctatccccggacagcggatcgacattaggcagtcgacaccggacagtccgacaagaagcgtggatctcggtaccgccaatagcaagccgcttccagtgatcttcctcaaaagcagacgggccttgaatgatgatgttcgcgcggaaacggcgaatgctcaatcgcgggattgcgtaggcacagcgtgctgctacatcccggtgactggagatgctgagcaggtggattggatacgcgtctgcgaaggctgtgcttggctggaagcctaggtcttctttgcgcggtgcgttacggaagatctgccgtgaatggggtgcactggcgcggaagagtgtcagggtcttttttgatgggtcggaccctagatatgcgtgtaatgatgctgggagcagtctgccgtagtcatgggctaggggcttgtctttccagatcttgactgggactagtgggaacttggagtccgcggggggaagtagcgggacttggaatgtccgttggcttttgaggaacttgagtgccatgccgagcttgatgggcagacccttccatcctgctggcggaattcggggatacgatatcaacatcacaccctgcgacttgacttctgacaggtctgcgttgtaatctggggcagacgggtcaggaacccagatctccggatggatcaaggctagacaattgaagcttgcatttcgcagggtacgaatggtccattcgtcattgatgtactctgcaaagacgaattgtctatcaaattcaagtccagttggtacgacgtttgagacttgcagctcgactgcgccacaggatttgagcgggtagctgaacaatgcctttacgcgccaggacggacggccgtgatcatcttgattgctaggtagaccctggctgtactttgagtcgaactcatcgtctaggttgctttggcctggcggaagtcctaggcggcgacatcccttgggattgattggcgctgtcagtgttttcaatgtcttcagagaaagaaaaagcacagatagaaagaatagaataaaccaattggggacgatatcatccccgagggaaatgtcaacattggacatgaggagtatgcaggactcgagatcgaaagggaaaaaagtcccgccctcggatctccgaaccgtcaacattccactgtcctacttatgatggcatctttaatgtcatttttagagattgaatacagcgttggagcttgaatttgtttccatattcttctactaaatcgggattcattggctttgctgccagtcatcctgatgcgcccatgagcatcaacatggaccttctcggtctagacggtctcgaagggttcgaagatacgcgtaagtaattccccaaagccttagaaaagcacaaacattaatccattcccagcgcccgtggtttcgatttcagcgtctcagtccctcaacgcgtcggccgctacccgcgacccgatcgcgacgggcctggcgcgtctggacgaggctctcaatgacctccccgaccagtccaaccaaggcggcatcctgcgtggacatgttacagaaatattcggacccccaggagccgggaagacctcgctggcgtgagtgcacttctacccacaccgccacagtctgatttaatccagtcacaggttgaatattgcatgtaatgcactacgtgacggcaaagtagtctggatcggtatgtgatcctgttagttcccagagtcagctgcgctgccctgctcacaccgtcagatacgggatgtcccttgcccagtctccggctggaggaaatgtccgtcaacctggatgactttgtctatttccgggcgcatacgctggctcatctaatagccctgcttgcacgtccaccaaaggggtttccaccgccggaaacaaaccttattgtcgtcgactctgtgtcgaatttatttccagcttacttctccagcgcccaagagctcaaggaccagcctaccgagggcaaattcagcgataaaacacacctgcaatggctgatcaatcgcaaatggaacattgctagcgagctcgccatgcatttggctagactcgcggcgaaaaatattgccgtgttggctattaatcaagtccgtacggagatcaagggtcaatctcacgcagttctgcagccgctcttgtcgggcagcgcgtgggaggctagcgtacagactcgcattgcggtctatcgtgacctgccggatgagcgatttgcagaagttgagaagcgcgcgggtaagccattgcccgagcaagccgggctgctcgttgcgtttcgcattgaaccggtatgttgtgtcgatctccggcccactgcatgcgattgtgcttataatctgtctaggatggtctttatgaaacagagggaaaggaatctccgccctccgagcctctgacccctttgccaaagccctcttccgactttgagtactatgatcctcctaccccgactccttcgcctatatcctctgtgctgtcttctgcgccgtcctccgcggaattggagtctccaagcccttcaccatctaagctggcgtcgccagaacagcctgtacataccccaattaagaaacggaagctggaggaggtagccgatagtcaggatgaagactccgaggaagagaatgtcccatggacagacgagacaaccctgaacacgaattaaacatgaaatgattaattatttcgcgcaattactcgcttatcagcgccataagatgctatagaaaatagtacgatgtctctcatttctttgttggatatctctttcaatgtctatttttggtatgttcttatagactatatcttttttttccacatgcaaggatgaaaatatccacaaaatagtcaaatctctttgaatcgcaaatgttttttaattaaactaatatcggacttcgcccccaaggccgatgccggacgactattgaatgttgatctatccccttcccttgcccccgttaccccagattttgggtgcgaacttgtaccttaccaagtactctatgggcacccctgaacacccttgcatgcccaaggcttctttttgtttgtttccccttcactcgttcagacaagtccaaaacctgatctcctgcatgacagagcacattgtacgaccagtccatatcccactctgtatccgctctttcgccaattcgcctttttcttccttccttttacaaaaaacttttcaattccctgtttgtccacgagaacatgtggacacagcagacagggtgaaccagactccctcttcgagtccggtcgctcatatacctccccaagccccgaatgagtctcttctagaatcatgtccgacgttcccctggacatgctgaacgggatatccggtgcgctcgcgaaagaaggcgacgtacgacagatgatcctcgtcgccttcatcggactatcatgctacaacgtcgccgagctaattgtcctcgtgccagccacattccgccggtggcgcgggctctatttctgggccctgctcgtctcaggcgtgctcggcgtggtaccatactcggtcggcttcctgatgaagttctttactcacacggactccgtgctgtcggttactgtcctgactatcggctggtggacgatggtgacgggccaatccgtggtgctgtactcacggctgcaccttgtgctacgagacgagcgcgtgctgcgccgtgtattgcagctcatcgtcgcgaatatctttctcctgcacgtgcccacgacgatcctcacttacggcgcgaatatagtgcacagcggcgacgacgcctggatcaacgggtacaatatcatggagaagatccagctgaccgggttcacgatccaagagagtctgctgtcaacgctgtatgtgattgagacggtcaagctgctgcgccttggcgcggatgtgtcctcgcgcccggatgcacggagcatcatgtaccagctgatcgggatcaactgcgcgatcatagcgatggatttggtgcttttgagtcttgaatatgccgatctgtacgccgcgcaaatcaccgtaaagggtttcatttactcgctcaaactcaagcttgagtttgctgtgcttggtcgtctggtggatctcattcaggggtctagacatcctatctccatcgctattgccgatacgttgcctctttgctcgatgcagaggccgcccgagacgcctgatcgcggcgacgatgtgctttacgagcaggctgagccgaaggactttttggctccgccggtcggaggccgagttgttcagaggaggatgtttgtggagtctggaaggacggctttattagcaatatgacggtataaatataacaataatgaaatcgaaccgagctagaactggatattgtgtgtgtagtcctagagcataagccgtataaggagatgattgtgaggaatggaaataaattagaaatcaggggggtggctcggaccatctcctagcgcttcaaagcgtcctggtttgctatcaaggtacggagtaaagagacatgaagtagaccattaggtaggtaactgtctgtaggtggcatgcgatttgtaataggaaccgtcaatcaccaccagacaaaaggaaacgtttcattcgaggctacataaattatatgctctcgttcatagattggtcaggtagtcctcgatctgctccttggtcaacttgcggaaccgtggtccctgagcaccctccactcccttgaagcccagaaggtggtccgctggggggccgacaatgcctggaacgatgttagtcgatattcaccacaccttggctagctaagcagccagaaggaaagcaaaggaaaggcagaaacccaaactcaccaatttctattgtgtcaccattcatctcaccctcgatcgtctccttgagtgtcaacaacgcgatatggatggcatcttccaattctagcccttcagtgtaccgtttctcgaggaacgtcttggcgctcgttgcgtgtttgccgatggctgtcgccttccacgggtagtagctgccactggggtcgacctggtacagactgggcccacccttctgaataccgccagtcttgctggagatcttctcctcggggtcatccttcttagcctcttctgactccggctcaacgccctcgtcccagcctgcgaccagcagactgacaccgtacggtcgcacaccaccggattgcgtagcttcctgcactacccgagcgacgtcttgaaccaatatacgagtaggtgggtattcgttgtagatgcgcttgtagcctgtgtgcgagaccttgcgggccttgtcgaccagcacccggtagtcagggcccatgccggcgtagaccataccgatatccggcgtgatcagtgagatcttggatagcgagggaggatcgatcagaggcgaggatgacttcttctcagtcgcgaggacaatgccgttcgtagctatcacggcggtcagcttggtccatataggtgagcttggacgttttcgtacctttgataccaagggcagttacaccctggttgaccgcgttcaaggcatattctatatagatcagtcatcgatgcttaagctcagagacgatggtccataccaatttgcaccagctttccgctgtaatggagctgagttagcacgctgtcaattaaacaggacaagtcgtccttacctgggggagaatgtcgtcaaggagaatgagtatcggtcagccatgattcgctgttaataggaagagaagaggagaggatggaaagatcaaaagaaggggagctgtgttgtaggcagagatgggtgacgtttggcgcggtagagctcatgaaggcggtgaccagatcgggattagccgtggggtttgggacaccttcggcttttctgcttttcctcttcttctagcctttctttttttttcaacatctcaaaaatgaaacagtagctcggccttctcttgtcaaggttcgggtaaatttcgatgtgagaccaatggaagacacacagcattaccccccgcgggtctgtcgcatctgcctagaaagcgtgctgccgactttcgaaccctcagaattcctccagaagcctcgagtggtttatcaatcttccgatccagaatctggccgtctgctaagcccttgccaatgcaaaggctcctcgcgttatgtccacgagggctgcttgcagtcatggcgccatgccgaccccaaatatgggacaagaaacttctggcaatgtcccacttgcggctttcagtatcgtctggagcgtctgacttgggctcggtggatcagtagcaccactgcccagctaattctcacacttggcattcttttgttaaccgtattcctgcttggattcatagctgaccccatcattgatttctacttgggccccgtggatgtttacgccgaattggccgaggaagatgcctcctggttaggacacttcctcaaaggacttgcctctttgggcctattatcattcctcaaggcgatatttgcgctgtcaccttttccttggaatctccggtctgtcgcatcagggcgcaattcgggccgtaaccgggtcgcccagttgaactggatagtggtcatagttggcattggcactttcctttgggtatgtgtggtcacattgactatatacgacttagctaacgcagacaggctgtctacaaaggtgttcgttcatggagtagacgaacgctagagaaggctggcgaacgagtcatggatgtcccactaccaggtgacgagagtgacacggacgtcccaataccggacgctggaatgaaggaagaatagttcaatgaactcgcactacttaagttgccgtactcctctgccccatgagacgtcgattagtcaatgtgcgaagaacaataactgccttcattaactcttgattgtctgcctgagaagtagatggttggctcgagagcgtcttgttctcaagtcattcgctgcttcactcatcaggcagctttcttggggaaggcagtccaccactcaattgtaaaagagcgtcctgaccattgagtctgatctattagcgcttttggattgagcagcggtaaattcatgtatagtcatattttctattgaatcttattgtcacatccattgtctattgtccattgtcacgcgtgtgccttatttagtaacttgaatgcattattatggcagtcagtcccatcttacaaacacctctcccatcccctcttccctcttctccccctcatctaacttaactctcatctcatcttcagaatggatctcacactagagtcccaagccgcgattctttcctctcaagtcgcgatgggcctcgaatcagagggatctggatctgctcctcatgcaaacaccgagactgcaaacacagagaccgaaccattccctgatgctgagccattccctgaatacaacgagtccgagtgtgagatgcttgcatcttccatcgcagccgacaagcgccatgaacaagcatggatccacgctctcggcagagccgcaaagcaagagatccgcaccctccatgtcgatcccaacattatcccgtatatcgaaggcgacccatctcaccgcagccaggtcatcctcgaacagctccgagaccttctcgctgacccgcgactgcgtcatgagatccgcgggcaatttattaccatcgtcaatgccacccttcagttcaacttcatcatctttcaccaaaccaaggagcttctgcctctcaaagaagttggagacgcagaacttcagctcgagaccgttctcaaccatgttgaatttatggatgagatgcttagagagcagctgaagtctgccgaacaggtttcttataccctcgagagcgtctcgctggagggtacgtcggactacgaacgactctgcaagatgtcgactgtgttcgctaagtaggtgccacggctcttgtttcttgtctaccctttgcttcggcagctctgatacgcagaacaggaccatgaaaaagccccgtctccttgaacgacaactgcttgctttgtacatggacatgtatgaggaatggatccgcactcctttcgtccgtctgcgtaaccgtcagatcctgactgaacagcaacctagccccacacgcgcaaagctttcgcgtcgtatcattattgtctgggagctgatgaccagatgtatcgaaagctacggtaccttgaacttgctgactcttgagatcaaagaacagtactttgctccggtgctgggttatctttgtggctcgccagacatatgggagcactgctgggatcaataccaggcactcgagaaggatcgtcagcaaaccgagcagaacagagccgctagccaagaggatatctgaacgatggatcaaagagccactggactgtggcatggggtatcttttccatatctacgattttacgatttgtcttcagttcaataccccagatgcaatgttgcacgcgacacagcgaatgcataacgaaatcaataggaacattccaaatcatctttcccataactaacctcaagctgtactatccttataagccccaagcttaaacagcttcttcgcattctcccttccaatcttcaaccgatccgtatccgacatctccgccgaatcaaaccactcacacgcatccccgaacgtctcaaacggataatcaatcgagaacaaaatccgatccgccccaacctccgccatacaaaagtgaagcgtagtcgtcgagaaatgaccagacgtcgtaatccacaaattctccgcaaaatactcccgaatcgtccgcttacacgtctccgcaagtcccagcatcttctttcgatcctcaaaccagtggttaatccgccacatatcaaacgggatatgctcccccaaatggccaagtataacctgcagcttggggttccgatcaaacaccccattcgtcaccatcccaaggacatgcagactgaccccgtgcgcgaacgacagcggaggcccaatcagccatttccgatcagcccagagcttgtcgtagatcgtgcctgtggggttgcgcgggtgcaggtacagcggcacgtcgagttcagtgcacgtcgcccagaacacgtcccatttctcgttgtcgtagaagatcatgtcgtcgccgtcgacgcccgcacgctgtgtgtcgttcactagggcccctaggaacccgtgctgtgttacgcagcgtcggagctcggcggctgcttcttgcgggtcgtgcatcgagagcgtgctggcagggttagctggatgtaccatatctatcatgcaagtattggtcttaattatggatttgaggaaacttacgcaaatgctgcaaactgatcagggtgcgctttcactttctcggcgatgtagtcgttgatctcaacggccagtgcttgcgcctcctttgcgtcccagatgtcctgcacgccaggtgctgtgtagctgaggatttgaagaccgacgccgtggcgctcggcaaagtcaagtcggattggtccgacgtcgttgatctctgctgtgtgcttgtctgtgtcggttgcgaacatgcccgcccaccattttgtcttttcgtggaatcgggggagcgcgaaggcttcttcgagggcgattttgccgagcatgttggtttttagtaagggagtaagggaataagtcagtaaggaagtagaaaggcttgaggatggagataatctgtatgattatcagctgttttatagtaaatgcggggaccccgcacttcggaagcgttcaggctttccatggttacgttggatcatcagccctgtcaatcggaatgcccatcggaatgtcaatcggatgtgaaacctgataagtacattgcgtatacaaggaaagcatccgacggcggttcggtgtcggggcggatgcgggtagcggttggcggcggagatggtcaaggacatattattgtttcctaatctaggtcatgtctactacgtaatatctctagccacagatcgcagcccaatcccatgagtaggtggatcgcgtttagactgaacgatttcaatcgcttcttcatcgatcaggcctttggcgaccaaatggctgacatattccatagtccattcttgacaccgcttgttggtggtctggaaagccaagtgtgtgagcttgattcagacgttaagatacttccatagaatatatgcccattcactcacatcgtcgacaggggccatgaagttctggttgatccccggagtggggatttgtgccgccgctagttcgatcttccctcggggggtggagtcgatggatggagctgcatctggggaatcaacgatgtcggacgaggcgacctggccgattggaaaggttcggtcgtgagggtcgagactggggttgtagtttcgtttgaattccaggacgtagcctgccatcggtgccccaaccgcgtggattttggttccccggtcgggattggtagctgacgggacaaatattgagaagtgggctctttggaagggtgtattgcgagcagagatgagataaatttttcttgtagccatttttcttgttggttgtagttgattgcagagggagatggatgtgagatggtgaagctatcatacacgagtcatgtggctaaccatcccaggtcagtaaaaaccagataaagaaccagtacataagagtaaccaaaaagacatatagctaagaccaatggtcgtatattgagaataaaagagagatgaagatacagtcacccgtacttccctgatgaatagagtgaggtacccaatgcttgacaaggataattatactcaatttgggtacatttatttcgattttcaattaagaagaactaatatttgttcagacgctaatctatacaacgtaggctcggagaaaggaaaccaaatgagaataacacatagcagcatacatgatgacaggatccaagattacttcgcaacaaacttgattccacattcctctttggggcgacaagttgcagaatcattccattcgggaagaggaagacgattgatccttttgccctgcccgtcaaccatggtaatatcaaaccgcatcatagcataaacgaccacaagtttcatactcaacgtcgcaagtcgctggcctttgcaagcatgctttcccgcaccccagccaataaatggtgtttccttttcaattccccgagacggatcccagcgagttgggtccgggtagtagttcgggttgagcgctgtatccgaaaatgggtaaataacgagagaccccgaggggataacgtatggcccgattgtaagatctgggccgtggttctttcgcactgctgtgtatggctgcgaggtgcgcagtgtttcgcgtatacagaggtcgagattgggtgtttgagattcccaggctgtgagtgggatttccgagagggcttgggcgagggtgttcccagagagagaggctgatgagggcgtgtgggtagatataaaggctctgatctcatcttgaacatttgaggaccaagttgggtccgaggagatttgcatgattaaccatgttactagaaggaataactatcagtgttgttatattcggtgtgaacatcaaacttgcctatcgttccggtggcacgagatccagctagggataatcctaatatgcactttgagagagtcagaaccctgatgaaattactcaaagaacggaaatatggaatacataccccaaagatttggattgtaccatctccatcatcaatcatctgctgtagcatatcatccctcttgattccgctctttttcctagtgttaatggcctcttggacaattctgtaaacttgaacagaagtaaagaacttgtagaacaaggctgggccaggtaaccaaggcaaccaagttgagtatgggttagtgatagagtcgatagtgtcgacaagtgacttgagacgagctgaaagcaccgggtcattggcgatatcaaatgaagcaattcgcatgaccagttgaaaggtgaccttagataaaaccagatgtctcagttttctctactaaagatataagttagatacacgcacctcgtgaagggaagagcagggatcgagaatatactcgctaccccacgcgtccattttacgctggcattcggacagaatcaatggaatcactgtattatcttagtcaatcttcaagctcgagaacggaatagactaacacttctgaagattatcacttcgttgaatcgaagccattcgtctgactacgccgccaacttgatggggatcaaattgagcagcgccctaatgcaagaatttagttgttatgagaccgaagcaatcaccggggtcttacactgcccatcatgattgagaatgtatcatgtaagccgagacccttctccttgaagaagatttttcggccttcattcccagatagaacaatggcggtatgtcggaacagactggtctgatagatagaagatgatgtagtcttgaagccatctttgatgaaatcaaacctcttctcaaagaacaactgggtgaccttccaaccaggcaattgcaagcgcggaagggaatggccactccggggcggagatgccactggcacgtgtagtaacttatacaacaaggcagaaagtagaagaatcaccgaggtcaagctacccaaatattgaagagtagacgagccattgcagaaagcaagtaccagtcgagtcaaagtgctctgcattgtgatgactagaaagaagttacagaattgagactggataagatagtccccagaaagtctttataccccggaatgataaggccgaagcgggggagctcaatgacgacaagtgtatacgccttcccaaagtggaataatccaatgatagcgagccaatgaccaaatctccattgctccttccctaaatgtcgaacttgccggttccagccagcgcgagtcaactgattcgcaccttccctgacctacagctcatgaactagcctattcaagtatatcttggactcgctgttggctgttggctatgttgtcagcattagcgccatgcataccaggatttagattaaagcggatcgctcaggcgggccgttgatgctaatcaggaggcttatacccccattttattttggtatgtcatcatttcctcagagtccggagttgaccgagttctgatgcctacatttcggggtctctaggttagctcaggcatccatggctttgcaaaccctactgatatagtcgacccatgtaatgattatggagaatgattataggcaatttcagagcccatttagcaccgagcatataagagcaaattagatattctttccattatagaaatcatgaggcttacaaggctgaatttgaatagtcgaggcgtgatgaggtgcgtggtccttgccttagccatctaggatcgatatgcgaaacctgcttttgtatgcatgcttcctgactccttcctaattaggcccttccacggtgaacctggggatcccaaggctgtgggaccaataaacgtctgatttcaatcccgaggtcatttcgtaccagagttcgagaatccattttatagaacaagatcttactattctgactatcatcctgtcgacccgtatgtctaactcatattttggcttggtgataatctataacttaagctcatttcttctcaactgacaatctacataggctgagatcaatatcaaattcacttcctatcaggttgcatttactgtagctacaatggcattatagaggccagaaccaacaatgactttgtggtatactccgattggctgtattctagtttgcatacaagcgcatccattctatgcctattccgcgctgttgggtgggtgcgccaccatgcacctggggtccagctgattgggttcggacgttgaccgaatataagataatctattatgccaatcctttatgcaaagctgccaactagagtagtagaggcgaccaataagaagaaatactaagaaaataaaattgaagaaaatcagcatttattctcatgattctcaacgaccaaatcacaggaagccgccgcctccatacaaactgcaagcaaaagcacctagactcgtggcatttctcgagaaattgcaattcggactaatccttctgtgagggggggttacattgggatatgacttccaagtctgttcattagaaataccaatatgtcagagtagttctatagttctatagtaaaacagaaacaaaacgatctaactaaggacattaccccttgaatccatctcttccaatgtagaccaaatgtcactccatacccttctgatcacgcattaaatcccacatcctgagccttgaccaattcctccctctcataaagaacttccggtcgaacatccctcctcaacaaataccgctgtacaaaaaccccaatttgtctcaacccatactgcgcatggagcctcgtcggcacagaaaagacctgatccaactcctcaagcgtcttccccttcgtctcaggcataaacaaaagcaccatccaccacccaaccaaacaccagcttgcatgccaagcaaaagccccctgtattgtaaatgcagcgcgcagcgacggccacgtcacggccagaatgaaattgcagaaccacatggtcgccgtgcctagcgccatgccgtacgaccgcatatatagcgggtatacttcggctgtgtatgtgaatggcacggggccctcgccgggggagtagactacgccgaaaaggtatgttcctgaagcgatgcaggcgagacgtgcgttgtggctgctctctgggatccagaagctgaagcctgtaaataaaaaggccatggacatgagtgggaaggtgagtagcaggagattgcgtcggccgaatgtgtcgatggtgtagattgctggtattgataggagccagttgattaggccctagcctaatgaggcggctagggtagctgcaggagaaaaattggcctagggcttattatgttaactatctgaagaggaaggaggattgatggattggactgacctcgagaaatatctcggaagaatagtatgagataacgttcacaccgcaaaactgttcaagttagtactttgcaattactgctgtatgttttgcgaagatccactcacctgctgcataaacataacaatctgagacgccaacatcgctcgccgatttcgcgggactttgataagttccagcagcttgttacgcccaagcttcatcctatcctcagcctctagaagagtatgcatgtagtacaggtcacgagctgcctgaattttatgattccgcagcacacagatagacctataagcacggtgatactgcttctggcgcatataccaatgcggtgactcaggacaagcaaagacaaaacagcaaacgaccagaggcgggaacatcgccgaggccatcatacagcgccaattcaagccgacgatgacggtcgagtcgacattgtagaagatgaggtccgacgcatagccaaccataatcccaaacgccgtccacacatgccactgcatgaccaacgcaccacggatggacggtggtgctgtttcggccgcgtatatcggcacagttgctgacttggggccgatgccgaagcctagcatgaatcgtgcgacgaacatcgcccaccatgttgagacgaacccctgccagagacaggtaatcgcagacaagcagcatgctatgaatattgtacctcggcgcccgaaccagtggttgaatgggactgttagccaggagctgatgaaggcgcagcagaggtatggtgctgaatttactagaccgacgagccaggcactccgagaggattcgtcgccgatgccgaattggtgtttgtagaatatctgggctccgttgacgaccgtctggtctgatattgtcaccagggtattcctcaggggcttggaacttctcgggctgaatatacttacccattccctggactgtagcggataaagaacacagtgtaatgacagcatacattttccatggctgtgaccagcgatacgtgagctcccggtgcagtactcccttctcctggtttgttagaccagtcacattggcatattgttctgggcactgtgccaacacagcacccaactcgaaagcgcggatatcggattcgtcgcccatctcgtggagctcggctaatgtgcgcccctgattccgcagttcggtatggctgaacccagccaacggattggagagtttggcattgagactgcgccgtgctcgctcggcatctgttccgaatggcgcttgtgggacgaccttctcggacagcatggtggcaattttcttcttttctggcatctctattttgaagtctatggccaaaaggattgaggagacgatgtttggttttacggttgggaaggactgggttcctgggacaaagaaactcgaaagcaagcaaaacacatgactttagggctctttcctctcatgaatgaagtacatcaatgcaaatgcaggaagaattcaggtggatcttttaaagcacctgtcaaagaacgagacatgaggttcaaggtggactgaactaattgggtattcttgaaagtggctcattgcaaacaaaggatcatgatgtgctgtttacccatttcgggctgcgcctgcgcgagaaagtcgagtagaataaagtcaagtggaataaagtgaagaatgattcatagacttgatggagatgagtgggaagtactacgatgtcaatcagcacttccatctagggcacaatcttctcccatattgatgactaatcatgactagacctcggctctttccaaggtttctttcaacttggagatgttgaaaaagaacaatactacgaactgaataatggaagaaaacatatatgtttattaaaaaggtatcaatttcattataaattaggccagttgtgaaaatctgtgaaaatctgtaaatcatattagcaatgatctcatagactcgacaagagaagaaagtcaagaggctctgtcagataacatttatataacaatgtttatcaacaatatagttcagaacaggtctgtgtgaaaaggtcactcatcataagagcgaggagaaaaaataatataaaaagcacttaaaactcacattctgaaattttaactatcccgtccatgaaataattcatcatatcggagacagcttggcaatgtatgtccttggagaagcttggcaagctgaacaaagctacaagctatgagcttgccatgcacaaccacaaggccaatacggccgtttttgaagaaaaacggccatcaaaactaaaaaaaagacaagaaaggtatttgatgaagaggaaatgaagggaagaagaaaaaatgcgagcgccttaaatagtaaagtggattgcgagtttgcactgtttgcactctaaaaaaaaagtgggagctgcaatttgcccaagtcgatttctttagtttttgtgaaattattttggtgtactgtgtgggcagatgaatatttccgttattggaatcctttctcaaaaattatgaatgatatcgagagccccagactggaggagcaacagagtaagatcgtcctcagaaaataccccaaaaagtctcgactaatcgatatctacattatacagctcctaccaagtctccctttgcaaatgtccgtcccgatggtcgagccttcaactctcccaattggcgcatgaaggttgcaagcccaacaccatcgcgcaccaatgctagcccgagcccgagccccaaccctaaccccaatacctcccgcgcagccttcagccggcccggagcgcacgtcccccaagcgattaacgatgggcgccgcctatacgtcggcaatatgccatacacggccaagatggaggatgtggaggcgctgttcatagcggccgagttccctatgtatgcctgcaccacttgaaacctgctggcccagccgtgaatcgtcgtcaactgaacaacccccgaaaatagcgagcgcatagatattgccattgatccttttaccggccggaacccctcctactgctttgtcgacctacagagcaaggagcatgccgagcgcgccatgaccgagctcaatggccgcgatatgctgggtcgccctgtcaagatcaagcccggtgtcgccaagtctcaggagcgcactcagaacccgcctgagccattccgcattgatcgttggcgccagcaagagagacctagttttgcgaaggtcaacagtgactccagcaaccgcgtgtacgtcggtggtctgccgcgcttgaccgaccacggggctgtgcagagcaacatcgagcttttcttccgaggattcaaggtgtaagtttggatggcttgggtttctgctatcgtgtgatcagtactgatgcgctgtggtttgcagtgagaatgtcagcaaggtcttcgctccccaccccgctaagcggttcgatccgggcgagcactactatctgttcgttgatgtgggtactcccgagcaagcccagaaagctatggatacactgaatggtcagcaaggaccatggggtggtccgctgcgcgtccagttcgctcgtggtcccaaggatgcctgatctaagtacaggggcttacctaaaaaaagtattattaataataggatgtgtcgcattgtatcgcccattaagcgccataagtctaatgccaccaagcctacgtaggtagacttggagagcaaaaccgtttcctcgtcgaattggctgtctcgctcactcatcagtctgcggccaattcttttcttctattcccaaaattctaagtaattagacccattggtccctccatgattatctccaacactgttccaacactgtccgactttactggccataatacatgactcgctcaaatagcatacaacttggtataatcacagagcagaccgccgctaacacccaaccggtagtggcccagaatccagcaccaaaaattgataacaaggatattccattggacgtcatgatacgcctcctactctagttgctcctcctgtatattagtgagggtggaacagactcctctaggaataaaaccacgtggtagaccgaggttcacgccgaattgttagcccgtagcggaagacatagggcttattactaccattagcgaaggagacatttatactgggtgctatctcgatgaagttcaaattcaagggatttgatgtcatatatagtataatgcaagtaaaagactcacagtctgtcatgttcaaagattctgacatttttgcacctattactccctcttcgtcgcagaccagaactgcgtaactgctcgtcacatcagcaaccgtcctcactcacaagaaattggcaggaactcaccataagtgaacttcagcaacgtctctggctgctcggcatatagactgtcgatgctcttccttgacgtatagtccacatcgaacccgagcagatctgccagctggagcacttcctcagcggagagctggagagcggtgtggctgccccattttagcgctgcgtacatacacgtcagcccgagttcggcggtgaacggatcacaagagatgcataaatgtcagtgttcaaggaagggaggacagtaacatacgcccaagattgatccacaccccaccaggctttagtagccgatgtatgttgcccaagaaatcaatcacgttcttggaaatgtcgatgaagaagagcgtgacgacggcatcgaactcaccgtcctcggggaacatctctaagaagtcgccctcgacgagcttgacggccttgtttggccagtggtccggcaccgttagggcggaatagcgcgaggaggggttggcctgatacgtccatttggtcacaaagggctgcagggtgtgctggtgcagcgaggtcgtatggttcgttagcaggcggtaggccaggatggagccgtagtccagctcattggccgtgacatcgtaccctgcaccgatgtgaggtcgcgccttccactcaaggaagtaaaatagacgcacctatatcagcgatatcgcttgccagcctgcccatgccgcttccgggtacaagtaccttattccctctcccgttcccgccaaaatgttgctcaagcccatccagaacaggcggaaatacggcctgcctctcctttacgccctgtgtgctccaatctcgcgaaagatgcccaaacgccaggtccacaactccaaactccgcgtcttcattgtcctccagtgctcgtgggccggtgtggtaatcctctctcgcaatctgcgcgatcttttccgagaaccgggcattcacttcgacccccttcctagctttctcgaagtgtgcaggatagccgagcttgttgcttatcgccttctgcgcgggtgtctgcttggaataccgcgcatgcttccgctggagcacttgctcggcgaggaacggatactgctcgaaggaattgatgcagtgcgccagtccattgggaagggaggagtatcttttcctgggtttggcaggctcggcggaagcttcgaaggctcctccggagattggtgctggaggggcggcaagcggggcggtgagcggggaggtgagctcgacgtgaagggcttcggcgcgctcggagagggaggagaggagaactgcgatgtcggacaacgaggcagagccacggatagcgaggtagagggggaaggcgatgcagaggaggagagcaatgaagcgggagatgtagatagaggtgcgcatcgttgtgcttgtggcttcaagatggacgtgattgaagagcgggaaaggcaccacgatacagtaagacaccgtgtaactgaggcaatttagggccaattcgtggcactggatatgtatggcttcaagaaccagcgaattaaagcatatgtcccttagggttagtctcaaaggcgggggtctgcataggcgacttcttccatcatgcacagtaacccgactatttcggctatctttaatactgcaactatcgcgtcctgctcgctatccccttcctggctgaattatagccatgggctgttcgattttgttcctctacgtactcaccgtcctcgccgtcctcctcagcgcccatgcgcacgaggaacaaccacaaaagtgtagcaaactgctgatacgcaaagaatggcggacgttgacgaacagcgagaaagccgagtgggtgggagctgtcaaagtgtgtcctccttcgtaactaacacgtacggtacattgcttataccgagtagtgcctggcaaacatacgacacgaacggctatccttgacgaaggaccagacggtgcttgaggggaagaggagcctatacgacgacttctcttactcacacgcatcagtggagcacagcgcgcataggaatgcctacttcttgccgtggcgtgcgttccgtccctccttatcttccccaggcgcatacttacatgagcgcagatcgctggttcacctacctattcgacacctcactccgccacacttgcgggtacagtgggccaacaccatactgggactggtcgcgcgatcacgcggacctgttcaactcgccagtattcgaggattcaccggagtacgggctaggtggaacgggggactgcgattcctcccccgaggcagactgtaccgtcaccaccggcgcttttgccccgtcgaccggcaacttcaagctttcctggccgatcaaacacccgctgcggaggaatctaacgctcataaccggctggtacccgcatgagctgcctcaaaatcgcaccctcggcccagatttcgtccgtaactcaaccgagcaaaccacgggcgacttttttaggttccagcgcgcaatgacactaatgcacaaccacgtacataatttcgttgggggcgatttggccggagactgcccgaagaccctgccggaggaggattgccagggcatagcagtcagcttcacgcctaatgacccactattttggctgcatcatacgcaacttgaccggttgtggagtgaggtgcgcccccgaacctatgatacctccccgctccgtatttcggctgcagtgcaacgctactgaccagttttacagtggcagcgccatcatccatccaatttcgccgccttttcgggcatgcctctaaccccgcacaatatgactgacccacgctacgaccttgacgcgcacgcagatcataagatgtccttcgacgttcagagtgtgcccgtggcaccaaggaaggtgtttgatacggagggttggccgttgtgttaccggtatacagacgaggagtgacgggtactagactagactaatacaatatcttggagttcagtcacatcagagtcatattcactcgagttgggttccggcccatctggtttctcgttcttggtgaacggaaacgaggaagcgaggtgccttgctcaactagttctacgcacatagttaggtactctcccaaaccccaaagaatagttgtctagttccatacgacgcatattctttatattcccattctatacccactagattattaactcgactcctgaaaccttgtatacatttctggtgtccactccttatgctggttttccatccaatcatgcacctgtctccagtcccggcaggtatgtacagtccctccgcccgtagcaactttatccccattagccaatttcatgttcgtgccgcccgactctagggttgtgtcagcggcgcagagaatgccctgccgtaggtaatggaagcagtgcgccgtatggtccgacccgtcgtccccattaacaagcaccgcgcgtatatggttaaggcaatgcatctggtgccacatcgacacatcaaatgcgaagtgctcctcccctagaaaaacgaaacccttgccgggagggcggattgcgttccattcagccgtggccgtgatgccttccataccgtaatgggaggggtcgtcgtggaaggcggcttggatggtgcggacctttatggggagctcacgaggtcggtcgccggcgaggtaggctgctgtgcgttagtcatgagtgagaggagaatcaggaatatggcgcactgtatccccgcgttccgcgtattaagatgcggagtgagaagaagagggcgcccagattcaggatgaggcatacgctcagcgctgcgagaaggccgaggtaggggccgcttaatcgggtcacggacttagggaacatattgggtgtgcttgtagggtggtgcgtggagggtagcagagggagacgggatttttttcagcatcaggagcgggttaattgtgtctaacacatctatggccgtatccgctctggcttgggtaggtaagtcacgatggtcccgaagacgcaactgtcgagatgctctattcgccagagtgtttcttcaatgaagtgaagactgccagtaagcagagaagtacacgtagtgcagtttggggctccacaaataatcctaccctactccgtactcatcacgagagatagacacggtgatcatccttggggcaaataatgacgacaccctgatttgacttcttgctcgccaggtggctagtcaatgaatctcgaggaatttcgggttatcgcgcccctcttaggaccaaataggtaggtggttgagaagagaagtaagaattgtgggtaatgcttatctccacactactagtccttccagggctgtgcacgccccactctcgcttcggtccgagacatagttactccgcatctatagagcatatcacatcatatgcattacagatttacaattacatgtaaggcctcctactcctctatttttagtagtgatcgtcgaccagatgaggggacgatgtgagtcggcactttgactcggcacctctcttgttctgtttcggatcgcaaacgcataaattctcaagggcataacgagcactgacaacatctcaacgatccaccccttcatctcacacaaccaaagcatccgctcgctgccaaactccaacaatgcatttcaccaccctgctcagcctcgccagcctcggcctgaatatcctccctgtgcagtccgcagcagttcccgccgctgatttggctcgccgcgccggacagccaatcagccgtgtctatcttcctaacacggtcgagaagaggcacacctacggagtggatgaagacgaggcgctcgagaagaggcacacctatggagtggataaggacgaggtcgtctgaatactgttcggcggcagataaccaaagtctcgcatgtaatgaggttttaaaacgtctataacatgttctacaggcgggcaccgcattctcttcacaactttgttacatagcagtatacattatcaacagagtatatcaagcactatcttggctatcttttctgcatgtacatgtattatgtccagtctctctatacattgtaaggcgcgctagagtgccgttgcgttgcgcaattgtacattaagataagagaggggcgcaaagttgcaccttgagaagcgtaaagcgacacacctacggggtggatgaagacgaggcactcgaaaagaggcacacctacggagtggatgaagacgaggcgctcgagaagaggcacacctatggagtggataaggacgaggtcgtctgaatactgttcggcggcagataaccaaagtctcgcatgtaatgaggttttaaaacgtctataacatgttctacaggcgggcaccgcattctcttcacaactttgttacatagcagtatacattatcaacagagtatatcaagcactatcttggctatcttttctgcatgtacatgtattatgtccagtctctctatacattgtaaggcgcgctagagtgccgttgcgttgcgcaattgtacattaagataagagaggggcgcaaagttgcaccttgagaagcgtactacacataataattccaggacaagacagccctccagcctgcatctacaagtactcatccggcatcgggataagtgtctcattgttagccgcacacatagccggatgttcctccggaagagcctccatgtcagccatcttaacgtcggagcactatcattgcatcagcatcagctctactggggcaagccagagctactgacataatgttccacattccccgtcttcggatccctcgcttcgaagtatataactcccatctcgttgacctgggtctggaatggtatcgtgacattcacacacagctgtcccgagggttggatgggcacatcctgcaggatgatgtagggaaagtcatctctcttccttggtactctatgtcgagtatagagggccgtcacaaggtctccaggatggccggagaacgagagaaaactacgggagcggcgggagtatcgttgggggttatgcactatctccccttctgtgtatcagcctacggtactactagaccggagacagaggaacataccgcagaaagggttgtaccaatctatctctgggcgggccttggggtttggaccgcgggtcatccatgggaactggacgtggaagccggcatgcgcggcggatgtgaggttgatgttgatgccgagggcaagcaggaaggtgattgcagcgaggagggagggcatggtggacagaggtcagtgcagcacggtgtagagagcgagggcaagttgaagtgatctcagacggtctcactccttggccgcgatgatctgtttgaccatgcagaaggactgagtttctgatgcatcgtaactttactatctatggcaaaacttaatcggtccaacactgacccaaaccccgatgtggttctctgcttttagataataataaaaatcttagaaatagtgtttttacaaattaagttcgtaatactaattcaatgatatggtcgagatatatatatttttggaagtaccctttatatgtatgtcccatagaaaaggtacaatttgcattggacccgcaagatccaatccccacttcgggcccccggcggggccccggcgggggccccccccnnnnnnnnnnnnnnnnnnnnnnnnnnnnnnnnnnnnnnnnnnnnnnnnnnnnnnnnnnnnnnnnnnnnnnnnnnnnnnnnnnnnnnnnnnnnnnnnnnnnnnnnnnnnnnnnnnnnnnnnnnnnnnnnnnnnnnnnnnnnnnnnnnnnnnnnnnnnnnnnnnnnnnnnnnnnnnnnnnnnnnnnnnnnnnnnnnnnnnnnnnnnnnnnnnnnnnnnnnnnnnnnnnnnnnnnnnnnnnnnnnnnnnnnnnnnnnnnnnnnnnnnnnnnnnnnnnnnnnnnnnnnnnnnnnnnnnnnnnnnnnnnnnnnnnnnnnnnnnnnnnnnnnnnnnnnnnnnnnnnnnnnnnnnnnnnnnnnnnnnnnnnnnnnnnnnnnnnnnnnnnnnnnnnnnnnnnnnnnnnnnnnnnnnnnnnnnnnnnnnnnnnnnnnnnnnnnnnnnnnnnnnnnnnnnnnnnnnnnnnnnnnnnnnnnnnnnnnnnnnnnnnnnnnnnnnnnnnnnnnnnnnnnnnnnnnnnnnnnnnnnnnnnnnnnnnnnnnnnnnnnnnnnnnnnnnnnnnnnnnnnnnnnnnnnnnnnagaggccccgtgggggggcggcgggggggagccccgcccccgcctccttggccagcgatgacgaacgcacaagggtccacttggccatgcggaagggcggagtttctaatgcactgtaactctactatctatgatgtatggcgagcgcggtgagcagtaaggcgtaccaagcgtcgggtcgatccgtccccgccgccttgtttcgccatgcagaagggccaagtttctgtaactctactatcttcggcgaggtgcggtgagaaataaggcgtactaggcttcatgctgtcatactttctgagcggttacctggaatgggtgccatagcctgttttacgttacttgcgtttacctgcggcgtgccctctctctctggctcgctctgctctcgccatgtcctcctcccaagggaagtccagctcttcccaatatgagcctctttcactacaagatgatggagaaggctccagcgcaacttttgagaagcgctcctccgaggacgaccactctacccccttgttggaagcctcggacaacctccccgccctcgcgccatccaagccctcccagctgcccaagctcatcctctatttctccttcgccctagcgctgctatcagctgtcaatgtcgctctccttcccactacactatcaaagtaccaagcctaccccttctctgactctgacctcgaggccctcccctatggcgacgctagggtgggattggacagggtagcgaaattcattccccctcccaaggtctatcaccacacttggccggatagaattgcacgagtgagccggagattgaagaatgccgtgtggggtcagggggtgcaggtctatgttactgtcgaggtccgtactccgtacttgctccttcctcattctcttcactgacgcaagagaaggactcgacaattatgcgctttcccatctcccccaccggcgtcaacacctgcgcactctcctggcggccacctcccgagttctctccgcgtgccaaagacctcacaaccaagggagatataacagaaattgaagtctggcagcttatcgcaccctcagacatcttggctaacgtctcttccactatggacgagctcgattatgataccttatcgtattcgacccttcccgtgcgcggggagctgctcggcgtacttgaccttacagccaagccgaacagcacaacactggagttcgcctgtccccgcggggcggagagtctagtagtggaaatgaggtgccagcgcgtggcgtgtcatgtgagctttatgcaaattcatatagcaccgagctttgggtttgagttgcttgaaagagcataaagtgttcagataaacttcacatttctcaactagctcaacaaaagcaatcaaatagcattcatccgaataagaaattcttttcattccaaaaatcaccatggccgtggttatttttggaagaaatccagctggttgatacagtcagatgtcctcgttggaaaataaccgtccatggtgatttctggatgatcgctggcaaaagggtgcgtgttgcaatggatgagaaggatttcttatttgtgggagatgtaatgactcatgaggatagacatgactctaaagattcttaaactcggaggaatcgacctcgtacttatagaaaggcatcgggtcaatctagaaagcggggtcgttgggtagaatgttcttttactatcgcgatgaagcgtctgccgctttggaattttaccttgataactagtaccacttcgtaccctatctataaaaggtcctataccaagaagttgaagtttcaagaaaattgccggcaaaatgtcccagagttatctcaatccaaatactccggagtccggtagatgcctgaaagagtggggtggggctttgtcatagtaaaagaatgtcacaatatcaacccccagtagcttaccccatactaatcttgcggtagtgtgtggcactataagatgtccccataggcagctcttcggttgctactacgcaaaacccactcggccatattgtgtctaacacccatcgagctgcactcacaacatgtccactcaactcgacgccgcctcaatcgcccgggtctccttacacgaccccgctcacttcagcatccagcactcccaaaccatccaccgcctagtgctcctgcagcattggaacattcccactgactccaaggtgctggaattaggatgcgggcaaggagactgcacgactgtccttgccaatgctgtaggcgagcaaggtagagtagtggcggtcgatccggcggatttggattatggtaagtcctctagcttttctgaccctgctgcctgtcctgggtcgactgatagcccccgcaggtgccccatatactctcggccaagcacagggtcacatctcgcaaggcccgctgggtggacggattacttgggtccaacaaacccccctggattacctctcttccctttcctcgccgcccgccagcgaaagtaaggccttcgacgcgacagtgctcgcccactgcctatggtacttcgcctccccatcgcttatcctttccaccttccgtgccatcaagcagcacagcaagcgtctcctccttgctgagtggtcgttagtagcgacacacccctccgcccagcctcacgtgttagctgcgctcacccaggcagcgctggagtgccgtaaacctaacagcgaatcgaacgtccgcacggtactgggcccaaagcggcttaccgagctggccttagctgctggatggcaactagagagcgaggccctcgtgcaaggtggggaagggttgttagacggacaatgggaagtctctgcttgtctttcttcctctttcgaaaaggaagtagaggagctagtggttgatgagagagaacgggccgtggctattgcgtcacgggatgcgtgtgaggcgagcttgaagggcatacaagggggccggaaaggagttagggctatggatgtttgggttgctaatttcgtctgattgggcgagctgagcgtgtccgactcctagacctcttctaagcccgatctcttgatcgagatttgccgtggaagattgcctaaagaatatgtcttgctgcgatatatcagattaggatcctccgaaagttgaaaattaggtgctcccgacttcctaattaaaaatccggtgtatgttggcagtatatttgatagttcatggtactggtattcccgccaagaagaggcttgtagcgtgcatgcactagcgtcccttctcggccgggccggcatggcagggtagaacggaatcgaaacagcaattaaaaacaaccttacatatcagaaccaggttgatactaaaaaatgagggagcagaagcatttgcaatagacctccgacaatccggcagaaaactcgactaatgtatctgaagccacttcttggcagtaataccaagaccatgaattatcgaatatactgccggtatataccggcttcctaattaggagattgacagcacctaattttcaacttccagggtccagcggaccgcaatgttgagacaacactaatgcacgggcggattgcacgcctttattttgccagtcgaaaaattcattattaggaataggcggtctatcaaagcggtcaaaagtggacatgctggggttactaatgccttcgacctcatggggtaattatatagacggcctatggaattacaaaattgtccgacctttagaaagctacacatgcataaatgcttatctttggtcaaattaactgcctcggccgcgcataagcaagtccaggggtcggcatataacccctgctacttcgtccagagattcgaaatttgggatgaacttcggattctggcagatattttgagccagcgataggaattacccttgccccgatgtttctctagataattatagctcccattattcttccttcctagcagaatgcgtgacattctaccatcacgccatcttgctggtcccctttcagtactcattccccgagttaggccagctacggccagtttctataaccgccagtgcgccacgatattttcaatagtaagttttgacctagctcaccggattttcatcatttgctcgttactatacaccattcagtcaggcctcgacacatgagctctttgaatccaattttaacgctacttttgcgagatggcgtccgatgttttgcaaacgctgcagttctggaatatgctctaatacgtgcatgacagctatcgaccaatcccgcgcttatatggcgtcgcttgcgagggtccgtatttttggaaaagaaatttcaaggggccggtcaatgcatgctcgacgtcaaagactcaagggacgctcttgttcgtgtcaatctgacctagacccgctaagtcgcaggctatattccaatctttgaacaaagctgagagaaaaaaacgtattcactatctatcgatgtgattgtaaagtatatgcctgggcgcacgtctcttccgctcggccaaaagaccattatctatagtagtgcaatgcttatatcctaccgtagtgtatgcaggtgcgggttcctgactttccgggtgaccaacctataggggaccaaagaacccatttggtagggtcgatgtgaatctgacctgggagtcgattctcacaagactggatatctttggactcgacctgatctcgagtaagagaacagccccgaatcacctgcgtcatctcgggaggatacacaaccgctgcagggatgtccgcctattcactcggttccaggcgttgataagttgacaaagagcaggaagatccatgcaacgctagccatagcgtcaccgagtaaccacgaggccatttgttgatgttagtctagactttctcggggataagaaagataaaaccgttaggccgtaaaaccgagccccacactacggactctggagtaatggctgcggtatgcgacgctaagaggtgctacttaatataatcagtctcagcagcgaccaaccgcaggctcgtaattctcactctactacagtgccagatcaaacacggcggagaccccggatttcttagagagagaatggcattcccatacaagcatttcttggttatcggcgcgacagctggaatcggcaaggcccttgcgactcgtttaattgagtcgggggctaaggtcaccgccgtgggtcggcggcaggaccgtctggatgaattcgtgcagactttcgggcctacacatgcgaaaggcgagcggttcgacattggagagttggtcaagattccagattttgtcacaaggtacggtctatttcccgaggtccttagccggggctttctacatactaacggggtgatggacaacaaatagggtgatgaaggaatcgccagatattgattccattgtatttaatgctggggtgcaaaacccgtacgatctggcagatctcgacaactttgatctgacggcgtttcaccaggaagtgaagatcaacttttccagcttcgtttctctcacccacgcccttttgccatatcttcagaagaacccgaacccaactagtttcatcttgtaagacgcctacccggccgcaatctgcggcaagagctaatggatgtatcagtaccggctcgaatttggccatcgtgcctgccgccacgcttccggcgtactcagcatcgaaggccgccctgaatgtctttattctctgtttgcgggagcaactgcggcactcgaacaccaaagtgatcgagatttctcctccaccggtccagagtaaggcaaccctggccccataatgttgatatttcagtgctgacctttagctatagcggaattgcacgactacatgggcgaggatgcgggtcgccagttgggaatgcccttggacgcattcacgcagcaggtttatcagggactgaccgagggcaaagatcagattgtaattggcagtattgggccagtagacacattcaacgggattgtggacagccgtcgcactgccttcgagaacctctccaagatgatgcgtggtgggaagccctagacaggccgcagatctacggacgatcaagaacgctgcgttcttcgattaacctagagaccagctggaatgaatgctacttatgtttgaaatctctatgccatcaagtctttgtatttaccttcagttcatgtaccctctcttcgccttttagtaaagccttgggacgctcgaggagcgccttgatggcaaccatctgtgggccactgcggtacatggaactactgtagaatgcataccccgtaggccatggtgatcgtgaaataacaaagaatcgagtagccggtccattacagacgcggtctgggaaaactggtgcatcttctcaggggctagttaccaggtaactagttttaccgtaactgagtgactgatcacagcggtagccccaccatttaagccagtattcatagtccaacatccccgcgatttgtatggaatagacggactcaagccaccaggggtcaccaccccaacaaagttgcccctcgcccatatacatatcctgaagtcttccgcacccacccagaaggttctgtgggaaataatgggcaatacaactctggcctcaatccctcagtccaccaaccccgatgtggtcgattgggaaggcctagatgatcccctgaatccgatgaactggcccctgagaaagaaagtcgctatcaccatcaccgtggcactgctcactattttaacgtatgagactgcttcccaggcccccttcgtcggtagttcggaacctaaaacgaagagaaatcctaggccactgggatcatcaattgtagcaccagctgcctcccagatcatggaggaattccagcagccctaggatgatgagttgcgtgcatttgtagtctcggtctacgttcttgggtacgcttttggaccgatgatcctcgcccctctgtctgaattatacggacgcaacataatctatcatgtctgcaatgtactctacctcctcatgaccatcacgtgtgccctggctcctaaccttctgggcttcatggtgtgtcgtctgctggccggcacggctggcagtgtgccattatccatcggagcaggatcgctcgcggatatgattccctcaaagaaccgcgggttggcaatgggtgctcgatcctgtgcttggacccgtgatagcgcctataggtgcgtatctcctgacgcctggagcatactgacagatacagcgggcggttatttggtagagtcaagaggcatcttttctgagtcctatcggcgcctcaaaggcctttgatgcaggcgccaacggtgactgtcgagtagaaggggtcagagtagtcgtgctcaaaatcctccctcaagttcttgctgatggaaacgaagtcctgggatgtctatacgacgttcgacaaggtttccgagaagaagctagtgaacgacatcctagtctttcaccctgtcacaggtgaactgtttgccatggtcatgggcgccacctttcatagtgtcgctatgaagtcactcgtcgccatgctggcgaatctcaatacgcctggtgtgagtctggcgaatactcaacctgcgacaaatggaacaaagggggtgaagaacagccaaactttgaattccgtacacaccaatcttcattccacaaataaccgggatagtggtagcattgttggtattgaacagaacctggattggattcttagtgtactacggcaactactcagctcagcgactgagattcctgttaacgagattgcaccaaccacttatctggcaaacattgggatcgacgcgctcatgagtacggaagtcttgagcgatataaggcgacagtttcatgttgatattccgatctccgaattcatcgctcttgacacggttctcgccatctcgaagttcccgcagcatgcatttgagcacactctactcgcatccacgggttccaaattcgccgaatgtcttacccggaaagccgacctactggagatattctttggcagtatcaaatctagagccttgctggaaaacgtctacaccaacgcccctatgttcgccgctggctcagatacgctgtggcgcatataccacccgtactttcatcattcacggcacagaagacgatcttattccctggaaacaggcagtgagaacttttgaagcactgcgacaacgcaacgtcattgcagacctccgcattctcgatggtgcagagcaccttttcgatctctacccaccttacaaagatgatttgcaggcagcaaaagttgtgcaggatggatatgaatctcttcgtaggcacgctggactgtgattagatcttgtgcggatattttggcacccatcatattatacttagaaagagcattacccttgtggatatatgtgttatttgttatgtgaggcgagataaactgtcgagttagtcgtggcactaagcattactgcaactttgtgaggatagggcctaatctgaagtggcaaattgacaaaggaaacaatgaagaaccagcagatgtgacgtaacctagagaaacattgatgtttattatggcgggcagaacccttaggcggtaggaagcaatgagccaatatgataacacaaaacagtccaaaggcggtctaaatactaattgtttaacaaactcgtgcaagcccatttaacttgccataagtgattgtagagcgaagcgaagtacagtaattaagtcatagcctcgtgtgcatgtcatatcaccaggtcttgtcacctataggtcccaaaatcattgaaattatgtcacgtgaagtgttatcggctaactttggcagaataacccaaccggcagaataaatacatcagtccctagagaatgaaccatcattatattccccagagcttctagccttacaccgaattagcttcatgtcgttgatagatcattggaatatttcatacaaacagaatacaaagcttttctacatgttacgagatcaggccgtgtttgcactatttacagtgctgcagcacccccgcagcactgcactaccgaaccaagggtccagtactgcagcgggactagtgctgcggcaccagtgctgtgggatttctcaaggcctaaactgttaactagttagttaaatagactatattcgaaaggatattaagaggataaacacggttggcacagtattaagagctatactagcttcctagttttatgttgggacagagagagaggaggttacaacatacaggacgtattgaggagctgaacccaaataggcaaaactaaccacatacagtagttcacaggtccgccgtttctatgcataattatctggatctattccctttttgttctttagtgctgttaatatcagtgggctgacaacgtagcacgtgagtgatttgaataacttggctagagacaatattgaagttgttatatatgacacatgacggatggccggactggcgggccacttttcttttataattagctcatccgcacacccgaagatgaggccacctcgaggtattcatatttgaagccggtgagagtactgagtactcaggtcaagagtccagtaactatatactatggcaacatctacactagctcaatgaaggataccggtgtgtgccggaagacaagtatgtattacacaaggtggtcaatccatttgcgcactgaatatcgaacttttatgtatactagtcaattctctttggattgcctacctgtcgtatgtccggggtataagcgcccgtataaaaacagccgcagggagacatgatccctgaaaggttagtaggtatgaagtatgaagaactgcatatgtatgtagtatagcgcttggcttagctttcgcaatttagattagagatatcactacatgaagaaatccccgcatatcagagaacaaggcattgtcatacataaatattaatactccgtgaatctatcaaagatgtcaaagtggattgattcatgacgttagtggggaatccagactcaccgcattatgcgcctccttgaattctgtttcttctgtttcttctgttctgtttcttcgggttttttatcttttttttattcttttctttgtgaattcatactataatccattcctacagactatattctccatatcttactcggccagacccccatgttgggttaagttctgcttcttggtccttcggcttcgggtcggaattgcccctaatcttcccgaaattctcgtatttgccattcttcatataacctcaacctcaaaatgttaccaaaaaatgtccagaataaggcattcgttgcaagggtgagtgcaattccgctagatctctgtttttgtctgatatgcacggggtcggtacattgttacgttgccgaggcttgcattatgtgtatgtgggttaggttgattggggattgtttgacctcatatgttacatgaagtataagaaatataagatgcctaaatcgcatcgtccgcgcgatactgcgttactctgatcgcgcgttactgcgtttgggactactatatcttctgtcttgtttaccttctgtctcttctctttctcacaactcccacaatcggacattctttcaatattcatctggcttttcttcgtgaaaggcacaactcagaatgttcgccgttaacttccttccgcagtccgacgactcaaagatatgtgttgtcatggtgggccttccggcccgtggcaagagtctcatcgccggcaagggtaagtgaacctgccatccgtaaatgaatgtgagactaactccgcgactagccatgcgctatctgggttgggtcggtatccctgcccgtgtcttcaacgttggtagctatcgccgcttcagcaacccgcagccaggagccgccttctttgacccccacaatgaagagggtgaacgcatgcgccgagctgccgcagaggctgccatgtcggacatgcttcagtggttcaagaccggcaagggtattgtcgccatcttggatgccaccaactccaccaaggagcgccgcaagtggatctatcagaagtgcactgaagctggcattgaggctctctttgtggagtccatctgtgatgacgaagatctcatcatgactaacatcaaggaagtcaagacgacctccccggactacaagggtcaagatcctgaggtcgctgcccttgatttccgcaaccgcattcgcaactacgagaaggtgtacgaaaccatcgacgaagatgagaagaagtacacctacgtcaagctcatcaacgtgggatcgaccgtcatcatcaaccagatcaaagattacctgtccagccgtctggtctactacatccagaatattcacatcaagcctcgttccatctggctctcccgagtaagtcaaaacaatacagtttccaaccattatgtgaagccttactgacgaaaatagcacggtgaatccgagttcaacctgactggccgtattggaggcgactcgaacatctccgagcgcggcgaagcctacgcccgcgcacttcccgagctgctgcgcaagtctggtgtccctgacaacaccaagatcgtaatctggacttcgactttgcgtcgtactattcagagtgcccgtcacctcaaggctgcgactggctatgagaagctggagtggaaagccctggacgaacttgactcgggcgtttgcgacggcctgacctacgaagaaatcgctgagaaataccccgaggatttcgctgcccgtgatgaagacaagtacaactaccgctaccgtggcggtgagtcctaccgcgacgtcgtcatccgccttgagcccatcatcatggaactggagcgcagtgagaatgtcatcatcgttacccaccaagctgtcctccgctgcatctacgcctacttcatgaacgtgccccaggagcagagtccctggatggaggtgcctttgcacactctcatcaaactcaccccccgcgcttacggcaccgaagagcagcgcttcaaggctgatatccccgctgtctcgacctggcgtggaaagggcacttcggcaaagcaccaggaattccccgctgagggaggaaagaaagaggacactgagaccaagcactaggggagtgttgatctgcatcggcgcggcgtcacctggatgtggggggaattcggattgcatgagatattcagataccacaaacatgcttttcctttcattatgcgttagttagcctactttaactgaacaatattattcttacaaatcactttttaccgcgggttcattgtaatattcacgcgttatcggaaagttgaagttttcgacacttgagcgacgactgagcgacgactgagcgacgactaagcgacgactaagcgacgcctgactctcagttaccgctcacttctaacgcgcgttacattctaatttgtttctatcagagaaaacttgtatgaacaaacgactagagaatagggcccgcgcggccagatctcgggatatagttatgctgactcagaactgactcagctcggacgtcatgcggagagctccagcagcggcgctcctcgaacctccagtggaaggaattgaagacagcacgcccatgttgtcagcattcaccgcgcggccgctcgtggagctcaagccgcgcgacaagtctcgcattgaatcagtcctagcctacggtgaccgcctcctcactggtttgaacaatggcaaccttcgcgtctaccgcgtcactgacgacggcaagaccgagctccttcgagaactagagaaattctcccgatacaagattgaacagcttgccttgattaaggaggctaacgtactagtctctctttctggtggttatgtctggctccacgatgcgcagtcgtaccagcttgttgaacagctaacccaaacgaagggtgcttctgtatttgccatcacgtcgaatgttgtcaatgatcccgatacaaatgtgcctgctattgtttcccgcttggcagtcgctgtcaagcggaaaattctcatgcgggcgtggcgcgacatggaactggagcgggatacggctgagctgagcttggttagtggggtcaagactctcacctgggttgcggctacgcgactagttgttggactaaactcgagctttgtcatggtcaatatcgagaatggacagtccacggacctggctgggccgggcagcattgaggaagcaggccggttcacgggtgttggcgccgcgagcatgagttatattggtatgggaggcatggtgccgcggccacttgtgacgagactgcgtgaaggtcagattcttctggctaaggatatcaacacgagtttcatcgatattgacggccaacctcttggtcggaagcaggtgccttggagccatgccccggtggagcttggatactcgtacccgtttctgttggctttacatgactcatccaaaggtgtgttggaggtacgaaacccggagaccttgtcgctactgcagtccatcccgctgccgtcggctagtattttgcacattccgcagccgaatatcagcctcgcccatgccggtaaagggttcctcgtggcgagtgatcgcacaatatggcgtatggaagccctgagctatgatacccagattgatgctttggttgagggtggttatctagatgaggctatcagcttactcggcatgctggaggatgctctcttacgggataagcctggtcgactgcgcgcgataagacttgaaaaagcgcagagcttgtttgccttgaacaagtaccgggagtctctagatctttttaccgaggtgtctgcacctcccgagagtgtcattcgcctctaccctcgcttgatcgcgggcgatctctctatagtcccggagtctgaaactctgaatggaaagacgaacggatcgagtgatgggtcgggtgatgatgttgctgctgggcagacatcaacacacgcagcctctattatatcatctgtgccaaagcctgatgaaggaagcgaggctagcagtatccgtggagacgacaaaggtacgacaagctccccttttttttgaatatatgctaattaatcataggtcttcgaatcgctgtccgcgagctacaaggatacctagcagatgttcgccgacgcttccagcgcttcctcaaccccgacggatctctcaaagctgctataccagtcgaagccacagatgaggcaagtgactcggttcttaagttactagatttcccatctcccgatgagtttgcctcacgaatttgtgccaaggcacggttggttgacaccactttgttccgtgcacacatgttcgcgacgccatcactagctggatccctcttccgcattgccaacttctgcgatccagaagtagtcatggagagactcgagggcactggcagatataacgacctaattgatttcctttacggcaagaaattgcatcgccaagcactcgaattacttcagcgctttggacagacaaataacggacctctgagcggcccgacacgcacagtcgcgtatcttcaaaacctacctccggatcaaattggcctggtactcgagttcggagaatggccacttcgtgccaaccgcaagttgggaatggagatattcctgaccgacactgaaaatgctgagacattgcctcgtccacgggtcctcgcattccttgaaaacatagacaccgcgcttgccattcaatacctcgagcatgtcattgatgaatggaacgacatgacgccggacatacaccagcggctgctcatcttatacttagatcaaattacatccaacgagcaaggggaatggaaggagaagttcttgacgatgttgaaagagagcgagcaatactcgccagcgaagatgttagatcggctcgatcgagagggtacattgcgcgctactcctgtgaaacaagccatcactgacatatcccagatgccaacttctacgaagcccgagctattttgtttagcaagatgggtcagcaccgacaggcgcttgagatctacgtcttcaaacttgcggaccacgagaaagcggaagagtgagtgatatgtgacttcaccaagagcaacaattgctaacaccagaaagatactgcaaccaggtccatctcgccgaaaaggccgaagaagagaattccatctatctcaccctcctttccctctatctcaccccaccccacggctatgagccccaaaacgaccccgcgattgaactgctagccaaacacggctcacgcctcccagccgacgccgcattgaaactcatcccggacaaacaggccgtggagaaacttgaattctatttcaagggccgcatgcgcgccgcaaactcaattttcaatgaagcgcgcatcgtggcaaacctgcgcaaggcacgggatatgcagatccaagcccagctcgctctcggtgagggaattcgtggtggaggcacgcgggctcgccacgtcactgtcaccgaggagcgaatttgcggcgtctgccataagcgtttgggtgggagtgtgatcaatgttttccccgagtaagtcgttttcagtcatttgcttttggtttgttcgtcgctgacttgttttccagtgatacggtggttcacttggggtgtgccaatcgaagacccagtgttcgagttgggtagtatgtttgctctctgcatctgcattcgcgaggtcggtgttgtgctcgttcttgttcatggtcgtcatgtcatgtccgttattttatttttattttttgttctccagatcaagcttctctgttcatttggtttgtttggtcgatggagactatcccagcgactttgatacccatagcatctgcccatttcaagatacatccggtcatgcaaatcatgcatcgtcctcaacaacctcctctccgtaattttcctcctcctgagcttcctgtgctgagatctggccctgcactttgtcctcttccatgcgctccgtaaggaagacgttgatctgctcctgcagcttgggcacgagcgactgcagcgctgagaggtgggcttgcttagccgctaatgtgccggttgtggttgatatcacatgctcaaaggtctcagtggcatgaggggcggtgtagactgcagtcaagctcgtgttggaggccatttgaaatttaacagggaagttggggaaattgttggccctggagggggagatggcagagaataatgtcccaagctatcctaccgcctttcttaccgccttttcgctgatctaagcccgacctcgggacttggcactgcttccccagggtctcagggtcccagtccttcaggtacggctgaatacgaagttatgtattactcgaggtacttcgtggaccatacggtagcattgccgaggctaatatctgttgggttctgttcaggcagtaatccctagtctgtatccggcctggatgcatactagtaagaaatttgtggaaattggaaaaaggaatacaagtgcaagggatgacatcaagcagttaactggtctacaaatataaatcgcaaggctataaactccgttgaatctagatcaaagcttagccaagtctccgcatctttcgtcgatctgagattctgccagataaaggtagaggaagggatcggcgactgcccagatgtggcttttgtaacgttgtaaacaaaaaacttcgctgaaagataacctgcctgaaagagacaaagacagagagagcatgggatattcattatgaatcctaccttccgatccccgaactcgcctgggcgtcaagtacctcctgcccctcgctacccccgacctccatctgatgacgaagaggaagacgactccgatgaggacgaattggttcaccccggatcctccggtagtgacgcttcttccaatgtgacaaccgtttccgccgctcctctcacgccgatcaatactcaacagtccgggggttacttccccccacaaccacgatcggccacttcacctcatcaccctatgccaaacccaacagctcgacggccctccggcccgggggccccccccccgcnnnnnnnnnnnnnnnnnnnnnnnnnnnnnnnnnnnnnnnnnnnnnnnnnnnnnnnnnnnnnnnnnnnnnnnnnnnnnnnnnnnnnnnnnnnnnnnnnnnnnnnnnnnnnnnnnnnnnnnnnnnnnnnnnnnnnnnnnnnnnnnnnnnnnnnccctccgtcgggctaccccggcaccgatcacggcaccactcacaggggttcttcgagccttccctgccgaccgcctcctccgaccagctccctaccgtgtcagcatcccgtatcgccgcccaggcagcaatgcagcagacaaaaaggcaacaaaatgtgatgcccccgatagaggatggttctcgtcccaggcgcagtggaagcggctcgcctcctctcatacccgctccgttgcgtgtcaaccaaccctccccgcaaccccctccgccactagggaatgtggccacggcagctgcgaatgtggtcttcccgcgagccggtgctgcgccggtagaaccacagcccgagaaacagaagaagaagaaactcttctcaaaaccaaaacatatcggaatcagcagtcatcaagatgtgagcaaagaccgtggtcttccctctccgagcaagatcagcgggttatcgcgcatggtcagcggctcggctacgaatttgaccgacctgtcctcgaacaactcgatgtataatctatccaatgcctccgtgaacactgtggtccccgcagatcgtccgccgcttccagagaaggaaaaggataaagacaagcataagcatcatttcctatcgaggcagaaactcaaactaaaagatcgcgtcgaagaccacttcaacctccctctatcatcggcttcgagtaattcccgtccggcagacccaaatgccccacaatctttatattcctttactcctgcgtctccagctcctggtgcgacatttggcaagtcggtcagtgggttagatctcctgcatggtggtcgagcgctgcgtgagaagaaaaaggaggaaaaggcgctcgccgagtcggagcagatggaatggctggccaataatactggcggtcctacgccacctggcggcttcccaggtccgtcttcagttggtagttcggggacattccctgagtctattcttcgggagaccttgcaagggtttgggttgaataatatgaccccagaggatgcgtgggacttccttaaggcgaagctgctggtcatcttcgatggcgaagacgtgcgcattgccattgaagatctcaacaagctagtgctcgttcatttgcagcgttgcgtggttaagagggctcctgcgtctattgtaacggacttgcaagaactcttgcagactggatttgcgactttgaatcacagttcgctgattggcctcccagatgaaaggttgatcccgcatctggtccaggtgtggctgctggtgtttggcacaattctgccattcattcaggctgtgtttcttcccttggatctcgagttcaagggctgtggacccttgatgactagccgagaagccggtgaattctggggtgcactgcctttcggcggaacactcgatgtgcgaagtctggtcttgattgccttccgtgactgcatgatcctgaatcgctacgatgcccttaaagcaaccttctcccggctcagcctggactccatcaacaccggattcccgacactcagcgtcacaactaagagtaccggcactggaggccgccctggtactgcagcctcgctcgatgccggcttcggtagttacaactcgcagtcatccacgcttctcagcaccgtcgacagttactcctccgacggcattagcgccatgaccagccacccacgtccaacgagcagtgactctcgcagtcgcgccgcctcaaacacatcttccaacgcagatcccctcttcttccagtccatcgcatcacctccaacctctaacaaacggcctaccatcatccaccgcggccccactgactcctcccacgtcatcacagagaccgtcggccgcatgctgcaatgcatcagcgtccttgccagtgtgcaaacgggcgacgctgcccaggagcggatcgagattctgagcaaatctctcaaacacaactggcttggtcgcggccgcacaggccgtgatcgtcgtggctttgtcggtgccaagatccggcctgtaatggtcggcggtcctcctgttattgatgatggagattccctcacgacggctggcattagcatcggtgcgagtactagtacagggggatcccggggccgaggtgactcgtcctcctcagaatggagttccaatgtcccagggcccgccatgagtgtgcgtggtggtgttagacgagaattgagtgttctatagctttgtgtgttttcttctagctactcgttacgattgtatgtatgacggcgggtgggtaccttttggcaaggggcgtttctgttttataaaggaattgatatcctcgggcattgcccagcaatttcatctacgaatcatatactaagcatatgccaaccggcaagtaccgccccggaggatgatagtaagatacaagaagggccattgggccctacctttatgataggagatgcagaggccaataagatcggagaatcgatcctctactacgtagtcgacctagatataaactacgatactattctactctgtagggaattgtgtgaatcgtacaatttttcttttttttttggttttttttttggggttttttttttgggttttttttttttttttgaatccaacagtactccgacaagtcagttgtcgatacgtacccagggctcggccaactagccactgggtaacattcacaattcaacagaggggatggcgtctcaccacgccatcccctcaaacaatcaagagagagggcttactcccgagccctcccctttcccttgacatcgaccttaccagcctccttgaggtcctggtaacggtaccggcaggcagtggagagaaccttccagccaatctgctccgaaacatgctgagcgatgagcacaaagtgcccatcattcagcagctgcgagccaaattgctgcaaggcctccagaatagccgcctattgaatagaatagttaacaaccagatcaactgagattgaggtcagagaaagggtaaagtgaatacttacgtcgaaaccaggccagggaccaagcttatccacgatccgtccccagcgcctggtcactgcccgccatgtcatctcgtcctcccattcaaatcgattcgcgttccacgcctccgcgacctcgctccaccttaccgcaggattcccctgcttcatctgggacatcatcttgtcccctttcgatgcttcctcccatgacgccggcggcttgttgccccgccttcttcgtttggaggcgggttgctgggcgccggagggttgagggggcccgggaactgctgtttcggtctgagagttagtactagaatgaggattggatgatcctgatgcatacgaaagctttgacttattcgcgggacggcgacttgtcgaagccgacgtggaaggaccagactcagtcttggtcttagtctcagtcttgttcctaatcgaagtgcggcgtgttgcggtcgacgcaggtgggggcatctcaatctcaggcttgaccgtggccttgagcgaggcgtggcgtgttttgatagacgcaggctggggggtctcggtatcaatctcggcagtcgtcttcggcgaggcgctgggttgctgtaccgaagcggaggttcgggctgagacggaggttgagggcaccggagtcgagctcttctttttggttgcacggcgtcgggcacgctttgcgggtctgtttgatgttggggatgcttcctccactgacggcaatgtctcttcagcagatttagcacgtttttcagacttaggtgtatcagcttgagatgggccaggcagatcgcgggccttgtcagccagctcgcggtccatggcagcccatttgaggtccatcgcagctcgttcgcggtccatgtcagctagctcacgctcattggcatcccaagccgacatggcctccatggcagcccgttcgcgggtcatgaaaggcggattgagggccatggcagcccgttggcgggttatttcaggcagatgatcgcgggtcatgtcagccatatcgcgggccgtagcagctcgttggcggtccatgccagccagaacgcggtccatgtcagccagagtcaggtctacggcgggcagatcgggggccatggcagcccgttggcgggtcgcttcaggcagatcgcgggccatttcagccagagagaggtccatgtcagccataatgcggtccagggcagctcgttcgcgggctatgtcagctggttcgtggtcaatggtagcaccaggcagatcgcgggccatgccagctagctcgcgctcattggcatcccaagccgccatggcctccatggcatcccgttcgcgggccatgttgcggtccatggtagcccgttcgcgggccatgttgcggtccctggcagcctgttcgcgggccatgtcagccagctcgcggtcaatggcagacccaggcagatcgcggtccatggcaatctgttcgcgggccatgtcaaccagatcgcggtcaatggcagcccgatcgcggtcactggtagcccgatctgtagtgtgtaagaaatcgaagtctaggtttgcagtggcagacttcagatcagcaaagagactgtcagtatcctgattgttcagcttttccagctcttcttgtatgcgctcttgttggaggtgctcattgtccaggatgtcttggtagatttcattcttatcctttttccatctgggatctccaccagcatctaagttcaggagctcctgctcatccgcgagaacgcgttcgtactgttcagtagataagatgcccatggggtcagtggtccagctgttatcgggagtcctttgggggtaagtgtagtgggacgggagcacatttggatcttcgaataggccatcatatgctggtggacgttcgaatctgtcaactccatattctactggacggtaaggctgataatcattcaagtaaggatcaaagaatggagccatggggtcatccatgtcaatggaaggatccaagtaaggatttgcatcgtcccggggtggcgagggcacgaaatcgaggtagccagtgtagtaggaaggatcctcatagttggtaggaggcaatggtgaatcggggatatcatccaaagtaagctcgatgccagtgggatcgatgccagtaggatcgatgccagtcgactcatgagatgtgccctcatcaccagacccaggaagatccatgatggactcaaggatgaaaggtaatgtggtaagtaggtttcagctgatcaaagtcaatattggatgcttggtttggtttgatagaggatgaaagataatcactgttgatggagttggatggaacagtcgagtgagtggggtccaagatggactaacgaggactgtgattgaaggtgcctcgacagaaagagaggcaagactcaggtcctgagagtgtccttgtacaatgtcagagtcttgggaagcaaaagaagaagtggagtgttgcaaaggacaagaaggaatggggtgttggaaagcacaagaagaagtggactcttgggagtcctcacgaggtctgttgttttgaaaatgaatcttactttagaagtggcagtgggagtcgcgtcctgaacgcgttggcagaatctcacgagagatatcgcgagaagacacaactgtcctcagtgatgaacttgggaggtctcttgatatgaagcagatagagagaagtgttctccttcgaattggacaggagcaaggttgatcaagtgcagattgagaatgttaacagagtcagagttggtgcgaggagaaagatgagtggtgcgaaagagacaatgtaaacaattagacgagggggctaatcgacgtattaagcacaacctcgacgtattaagtgcaaacagcaggactctgtttgagtgattgggccacctgaggtgtctgattcaatcgatggtgtgcctcttgtttcctagccaactagaccactagcacaggggaaagatatcttctagttctgtccattgtgtcaatcttaagagagatgaggtcgtctcgaagttcagcaccagagaactattcatgccatcaggagcattcgatgtaaatgatcaaccaatggtcactttcctaattaggcttatagaggctctgatcagccctatagcttctagcttccctagaagttactacagttactttactagtaagctgtctagcaagtctccgtgtctatcgccgtgtcgaaggtgttggtagttgaagaacagggtaaacattgaatttatattccccgtcaacctcttagtgtgacgtccaagtagcctacctcgacatgctcgatctttatatatatctcgactttatagtggatacactataccatattgacctatcatatttgatacttcgatttgattggatcactttgctctgaagatcggattgatattcataccttgctaatactaagaccattaacttagtgctttagggtgacacagggatattcaccaagtcagtgatgcctttgtctagagccatgcaataatgtctcccatagctctaggactattctacttctgagtcatatctagtaatgacccccattatacagctgttcagccttggcgcttaatatcaacagcggattcgccagggtttagggctaaagaaaaagtaaaacagattgcaagacagttaggcctccaaactgggcagttgaataataagtacaccgtatattgacaagaatagaccgacagaaattcgtggggccgactgattggcttcagggctgcaggctgcacagcctgcgcatcgtgatgcgtcgtgatgcgtcgtgatgcgttcctttcacataaaatgcgtctcacccacagcgccattctctttcttctctgcatttttgtctttctcttttcttcttcgtttttccgtatttttgctatttaatccatctattttccctttatattgtccaacttgggttaaatctccaactctccaactctctatctccaactccccggcttacggcccacagctcacagcttccagcttccagcctaccggactgggctgtcatggatacatcttctaccccagctgaggccaaagatgaagttgttccatcagagaacgtgaacggctctgcccagtctacagaaaccaaagaagtcaaagacgctgctgccgcccccgcacccgagacagcccctgcgtccacccccaaagtgtgcaaaaataaaaaacacaaaaagaagaataagcaaaaggaagagagtgacagctcctctgagtcttcttcttcgtctgaatccgacagcgatgccgattctgaatccgactccactgagagcgacgccgataccgagaagcgcaagcggcatcgactacgaaaggcgcgtgcgcgacgtgcgaccaaggataagaaacgtcgcaagaagaagaagcaacaacggtcgcgcaaggctgaggcatcggattcggaatctgactcttcctcggaggcagactcggagtcttctacggactccgatgatgagatagatgacaaggcgttgcgaaaattggtcgccaagctcaaacttagcaaaaagcgagctaagaagctgcgggaactggcttctgaagagttagccgcgagcgattctgtgggcgaagctcgccgcgagaagcggtctaagaagaagaagcccgcttccaaggtggcctacaagcgtgtagatcaatgtgagtttctcttcttctttcttcgtcttgcttgtctctcatgcttggaattttcgttgctgacttgttacagtatgggacaacaccatttaccagtacaagctcactgaaactgtggatgaccccgatgccgacgagtgggaccagtatattttcaacatccgtcgcaagttcaactgggagaacaagtatctcgagactgtcgtcgatatcaaaagcaaaccccttcgcgatgccctttccaagatcatggatggtgtcaagggcgtcagtcttgtgcaggagcccgccgtcgtcgatcccaacatgttgttcctgtatctggaagaaacaaggcagtacatgaagagcttgaagaagcagtcgcgcagcgagaagaagaagaaaaccagaaaagctgccgccgtcaaagctgcgcatctgaaggttctcgtcaaatacctcgacaccgactacgcagacatcaagaagaccctatacccactgctcgaggccaacacgatcaccttcgatctgctgtgggccctgtacaagcccaacaccatcgcttacaccccgacctacggcagcacagatgagccacgtgctttcaaaatcgagtacgctgtcaaagagtcctctttcgtgaagggtcagtggtacagtgtcgatggtcgttacctcgagtacgacggcaaggactacggcttcggcactatgtccgctgaagtcgacgccttcaaaggcgcccgcaagatcaccagtctcagctgctatccactgaagtaccaccgcgacgctgaggctctgcgtgcccgtctcgtcgaacgcggcaaacgcttcgtctccctccgtggcatgaactaccgcttccacaaaggcatggccttctacaagaaaaagcgctctctcatcatcaaggtcaatatcaatggccgtgtcatgatcgacccggctatccaccgtcgcatcaaccctaactataccatctccactgtccgtcccaaagatccggatctaatagatcctaaagaacttggagtcagcgacgacgagggtgattatagcgacggctgctgctgtggcggatcagactcggactctgagcatggcggtaactctgatgctccacggatgatgtacaaggtcgttgaggataaagatggatgtgcacgtgtcgttgaggtcgaagtcgacgagaacggcactgaggtccagaaggagaagatggaccgcattgaaggtgccacagataccaaggagcgcgagttcaccgaagaggagcttcttattgcctctcctgtggttctgggcttcgccttcagcgagaagctctggcttgaattcaccatctccggtatcagcgatatcgagtgggataaggaagccttcggctcgcttgtcctcccgtcgaaccaaaaatccatcgtcaaggccctcgtcgagtcgcatgccttccacgccgcgcagaacatcgacgacgtcatccagggcaagggcaagggtctcgttgccgtgctgcatggtccgcccggcacgggtaagaccctgacggcagagggcatcgccgagctactccgtcgcccgctgtatatggtcagcgccggcgaactgggtactgacccgcggacgcttgaggcggagctgaacaagatcctggatatcgcgcactcctggggcgcggtgctcctcctcgacgaggcagatgttttcctcgagaagcgcacgatccacgatatccaccgcaatgcccttgtcagcatcttcctccgtctgctagagtacttccagggcattctgttcttgaccaccaaccgcgtcgagacctttgacgatgccttccagtcgcgcatccatgtcgccttgcgctatggcgatctaactgtcaaggcgaagaggagtatctggaagatgttcatagagcgggtccgcgctatcgatggcgtgcatattgcttctttctccgaagaggactacgacatgctttccaggcacacgctgaatgggcgacaggtatgttttactgttctatttcttctctctatacaaatacaaactaaccaaactattccatcagattaaaaactccgtccgcaccgcacaagccctggccgtcaacgagcaagcgcctctgtccatggatcatatcaagagtgtgctcgaagtggccgagacattcgatcaagacctgcgcggcggaacgggatacctagacgccatgcggagctatacttgatttgatttgattatttccgaatatcttgggcaatttggatgcttactatgaatatcgttgcggatctagtattcagctcgctggttgcttttgcttttgttgcttttcgtatctgcttgctggtttcggttcatctcgggtacagagtattcaggtacgacgtcgcttcttctggcatggacatggggcgaatgagtttaggtagcttgaatacaacatcggtcaaaaatgggtttcggtacaagtcgggatcgtaggatacaccgatctatagattataatggattatcaatctagtgaagaacgttgtcatacactttcattattacaaaaacaaaagtcacgacgggacatggctagtggtacatggaatttttcaagggttagccttgacgaagtcaacacccttcttgatgttcttcttcaagtcaaccagggaggcatcgaggagaccctgctcgtactcgttgaccttgccaacggggaggatctgctcaacaccgttggggccgagctcaacgcgggaagcgaagaagtcaacaccctggtccttgtacagaggggagtcgacgaaggtgggctcgatgacacccttctcgccctgagcggcgcggaggagagactcggcgaagcgggcaccggccatggccatggagagggtggcggaaccggcaccgtccttagcctggacaacctcgtcaccaccgaactggatgcgcttgacaagggcgtcgcggacctcgccggagatggaggggtggctagactgcgaaagcagggggacgatggtcacaccggagtggccaccaacgacggtgacggcctcattggcggggttggtcttctcaacctgggagatgaagcgcgaagaacggacgacatcaagggtggtgataccgaacagacgcttggggtcgtagacgttgcgggccttgtagacctcggcaacgatggggacggtggagttgaccttgtgaatgacgcgtggttagtggggcctcgaattgtggagcgataattgcgacttacggggttggcgatgacaaggaccagggccttgggggcggcctcagcggcggccttggcgaggtcgcggacaatggaggcgttggtgttgaagagatcatcacgggtcatgccgggcttgcggggaacaccagcggggatgaggatgatctcggatccctcgaggcagtccttgagaccggtaccctcgggcttgtagccggtaacagtgctgttggtgttgatgtggctcaaatcagcagcgacacctaaataaagtcagtaattgcttttgctgaacgaattggatcattcataccgggagcaccgcggatatcgtagagagcgagctgggaaacacgggggttgagcttcagcagcagcgagagaggctggccaataccaccggcagcgccgagaacggcgaccttggaggcctgcgcgaagagttaggtttaattctggggaagacagatgaatagaaacgcacattgaaagcggaggccgagaaggcacgcttctggaagaggttgacagtacgacgagcagcaaacatgatggatgattgagggatgtggatgtgagaagggaagaagttgagggaaggaggagattccggtgaaagagatgggattggcttggctccacaacaggttccgagctcccgatggctcggctgagctctgcttctcttacttcgactaatctgctattttgggatttcctaacagcaattgtgacgttctggggtttattattggctagctgggcttaaaatctctctaggatcaaaataatacctcatttccatgctaaaaggcttatgtcccattctcggagcaatggatgtcagctctgcatgtggtaatcgcatcatcctgtcaagcgaggtaattaatttcgtgtgcttaacgtaggaagaattgtttccaatcgatatatttagcttagagatatatatccagtgagtcttaaggagctacaatgccttagaaccctagagaagagactagcctatagttagttgtatagttatgcaattgaaggtccaggtgtccacgggtgagtggtatactgtcacgacgtcataggcccagaagttcccgttcgacccaatgcggaagtacactgaaataatcaataccttgtgtactagaaggaatataatggattactttactaaatagcaagtcctataggtataatcgcatactcggaaatagctggtgatggtccatagtgaagttgaacctagcgcaacctactccgtagcatatatatacattacaacccacactccgaaacataactaacacttgtcggcaacaaggacctcaattacaaagaccaaacgccggcgctaatgaacccaataagcccaatacaagatacaagatcatgtcctacccaggtaaaccccgagaaccttcgccagctcccaactatacccagacagagaccaagactacatagtgatataaccctaccgcaagaagtgtagcactgcccagcagaacaaaaagaaaattaccacaccaccccagaaaatccacttatcctggcgcgcccgccgctccaccatccggatcgtatcgccgctaacaccaagcgtgttcgcaacgctgtatagtcgccgctgagttcccttgagtacttcgcgctgctgtcctagatcagcgaggaccgctcttccgcggtctaggaaatcatcgagttgattgtgtgtgttggagaagaaggactgctcgcgtagcgcgtgggtttcgcggtcgtagtcggcggggccagcgccaaagccgagaccggatgatgagggtgcgaaggctgaggtgctctgcgggagtgaagattgcgcataagggttctctggtgttgcggcgtggtgtggacgacggcctagaagttcattgtggttggtgaccgattgctggtatgaggtcagtattggagtatctcatgacaggattgatgtatacatactgcatcttcgcgttctttgcggagtcgatcgaattgtacccgatagtccgcgagctcacttcggaagttcttgacgcggtcgaacgccttttgttgtttctccggaattagttccttcttggagagtgcggagtagtcatcgacggtgcgggaaagcgatgccaaggaagcagcaagctggcctagaagctagaagtcaatatcttaggttgcgaagagtcggtggtaggagcgcaccttgtagcgcgggtgaggaggtggttggcgactgtgaaaatgtatccagatcacggcggatcgacgatgattgctttaaagcagagttgaatagcgagttctgttcatgttagctgtgtaaacctatcgcgaggaactgcaatatacataccatgttgtcaatgcgccgtatagattagacttttagattgcttcaatacccagtaagtcgtggaaagaggagtattaggactgctagtaagctaattaagagatgataagctcccgagctcaaacaccaaggtcatcatctgatcccaccggaggccagatggtcttgtttgggcccattctgacgtggttcaccgccttcaggtacaatacattgggatatttttagatgcataaaccaggcgatctttgaatcacaacgtacttgattgaggaagatgtcgccaagttatgattgggtttaatgacttgaccggcacctaagggggagattgcgttttatctcctttattcccaaattcgaggatttctatcagctaagttgttgaggtttaaattgaagaagtcttgcaaaggtcaccataacgcctcgttttagatttccaagcagggggataacaagtcccaactgtagagaaatagaaacaaatttggcaaaaagaatcgggtagagatcgctggctcgagcctataccttctccgcaatatcttccatatcgttttcagtgagaacaaaatcagcctccctgccctttttatcgcgaagaaagatgtcgtggaatggtagcgttaactgtcccatgactccaggagagtttggccctgggttccgttcaatctcactcttttgtgcgctgctgagaaccgaaggtccatgctgctaccaggcagtaggtttgttgcccacggttcgacagtaattcggcctcgactaagaatgtgaattgtaatcgcggtcttaatttgaccgttagagtctttgaaccaaaattcgatggctgaggctttaacacgtttgagagcacgcgactttgccgacaaatgttggctacttggcggatcttccagctggcggaaagtatggcgtccaggtaatatctgctctcctagttattgccccactgcggacaattcttgtattggaaggcattaagggttttatctcttaacacctccagctactgtggcacactgtgccatagtatccattatctagttatggatcacatggtcgattagtcatcctacactggaatcccccaccactaggtagactctgcgagtagctcaacttcgaatatctacacgtcgtacttgctaggaagacactacattttgtcatattctacaactgctagaacttgaaaggaaaatgatatcgttgttaaggtactggtacagtcaatccgatccgactcctttcgccaaatgagaatgcaagaccacagaagagctgggatggtatatcaagataaaagcaattaggcaacaccaaaaagacgaacgccatacatctatttgggagggaacttgttctgcaagaaccatctagaccatagattagcatcatgccacacccatcagtccgaaaatatatgctgtacttacttgctgacgaagtagtccacggtaccaaagattccaacagcaccggcagagagaccaaccagctcccaggagaggttgccgcgcgcgtgttgcttgtaggcaccgaagccgaggcctgcaccgaccagggttgcgatagcggcattggcaatgaagacagggttgctggtgtttccacagaggctactgctcttcaccttgtgggtcttggccttcttcttttcctcgtcctcgcgcttcttctcatcggcttcccgctctatccgctccgcctgggtggtggtttgaacatcttgctcaaggaagtcggactccacagtctgcacatgggggctatcaacgtcgatcaacgaagctgtgctctcggattcatcgtggtagactccgcccaccgggggagcacggctggagtatatgttagttttgtgcatggagaattgatatcgtgaataacttacgcctgttatttgttagcactgtaatttttgaagtttttgaatttagatatgagtttgaatacttacatcttcgggggactgcttggggcccttggcggctgcgtcggcgtaagacatgatgttgttcgtgatggtaggtaatggttctgtggaaattctagtcaacaactaaaacacctcaaggtctagaacgaaaatgtaaacttactggaaaacgtgatatgggaagggaggagtccgagggggaaaggaaggatttatacccaggaagctggggggtgatgacatcacgtcattgacctgggcccactaccaaggttccgtgggctgttgatctcataatagctatacactagtagtactagcagtacacaaatgaacctgaagataatttacgtccactcttctaatgaaggcttaattcaaataataactcgattagatattacggtcattagaatcttgacttgacctcggaaggcgttatcaggcacaacaacttcaccaaaacacaaagatgatgcagaagaagtcgagaaaaatttcattgggagaatttaaagctgctaaagagatcaaagacaaatgggacctatgtaatggtctaatgagggaggcaaggtgttttaatacagattacatataagtcagaacaagagagcttcgctgtctacagaagaagctccagagggttctcgacgaccttcttcagctccttgatccattcaccaccaacggcgccgtcaaccaccttgtggtcgaagctaccggtcacgacgatctggtcgtcccactcggtaacggtgccctcctcggtctcgacggggatagcgaccttgcgggtggtgccaacagccaggataccggcctgtggggggttgatgactgcggtgaagcgctcgacagcggggttcatgcccatgttggagatggtgaaagtgccgccctggtactcctcgggcttgagcttgttatcgcgggcacgcttgccaagatccttgatctgcttggagatgctggagagtccgagaccctgaacgttcttgacaacgggggtaatcaaaccagagggggtagacacagcgacgctgatgtcaacggtgttgtgctgacggatgatggcctggccgttctcctcgcgccagctggagttaacctgcgggaccttcagaagggcagcagcgcatgccttgaccaagaagtcgttgacagaaagcttgtactgaccctcagcggaagcgttcagagcctggcgaagcttcaggagcttagtaacggagagagtggtggagacgaagtagtgagggttctcggccacggactgcttcagacggttggcaatggtcttgcgcatcgagctgacggggatatcctcgaaggaggcctcgctggaagcactagtggtgctgggcttggccttctcaacatcctccttggtgatgacaccaccacgaccggtacccttaaggcccttgatggatatgcccttctcgagggccaaggccttagcggcagggctgagagagggctcacgatcaatgctgggctggagcttctcatctgaagtctcgggctctagtgcggcgggtgcctcctgagctggggacggggctgagggctcagcgctcttgggctgctccttgtgctgctcaccgagatcaggcttgtcaccaccggcatcggctgtggtaaaagactcgaaggcggagatgtcggcaccctcctcaacaaggacggcaataggctatagggaagacaagttagattgatgaaacgaccctcagagaaactgggtaatttcttaccgagccaacagcgacatccttctcgccgctctccttcaggaccttggctaggataccctcatcctggaactcaaaatccatctgtgccttgtctgtttcaatctctaccaggacatcaccgggctggagggcatctccggccttcttctgccacacgccgatgtttccagcggtcattgttggcgaaagtgccggcatggtgatgattgtgtggggagggaaagctatagacagacatattagaattggtgtgttggagaaagagataagtcaattgtcatacacttggaggcatagaagcgggaaaggccagagagcgcaggcacttgggtcctggtggaaacatcattagtatcaacccacaatcataattattaattagtggaacataccgaatcgcctcctggagcttggaggagacctggggccggcgcatagcaacggcacctctggacatgaacatggcgcccggggtgcgcatccgaatagctgacgcaaccatggtgcctgagacttgttgcgattataaaaagaaaggattaaaggcccttgacgctgatatgaagaaattgaaagagcccggtacagagaaacgtgaagggccaagaatggatgaggttggggtagaaggagatgcctctaaatcacgaacttttctgttgagctacctatggctcccggtgagaggagcggcagcggcctcttccgatatagtcacgtgctgtaatttacagtctcaagctctggctatgtacataatattctgccagcaatatagctctacgccagttataattgattataaacaagcggtaaacccctctcagaaggcggtataaacaagggtcaacacttttgcttagtcaccgtattggttatccacggattgtttttttgggggccaatgcctttcctaccgcattaggtatacacctatgttgtaagaagaatgttggaaaacattcaaaagcatgtgagatcgaggaattaccaagctggaggtagttcttgtgatagttatcatttttactagcaatatagatgtactatcgtacagggtacatgcctatgtagtacagtacttagttacatacatatagtgtttaccccgtactccgtacagaaccagacgatcaacattctgccaggcaaaaaaggccggtgaggacctttggaatctccggctccagccaatccttagatgaggtaagcatgcattagtcccgattcggagaagacacgcagcccccgtccttacatggtcatcgcaattgtttcaagcttcgccacgtttactcgttcgatgtttttgatctaattagatcactccgcccggagtcaccctgactatggcggacaccgaagtcggctcagagccgacccaatccattgcaatgcctgagaaatccgtcgagacccccgacacatcttctacagtaccaaactccgacgagccaacactgcccgagcagaccgaatcggaagaaccaaaccaggagagcgacgagggagtagccgaggtccaggaagatgaagaaaaatcagaggtcccgtctaagcacgagcctgaacaaactgaacaagaaccgcaaacagacggtccgcctacgatccaggaacccccccacgaggacaacactgcgacagaaagcagatggcgatcggattcgcggtcaacaacggctacgtttatgacgcagcgatctagcccagtcagctcgacggtctttattgtgacggctctggacaatatcgctgcttcgcgggacgcccggagggacaaaaagctggaggatgccacacaggtggccctggccaatatcagacaacctgatgggcaagccattgatccggagcttatcttccgtcctctacacctggcaagcaaagccctgagcattcctctacaagtgactgcattggactgcattggaaagctgatcacatactcctatttcgcgtttccatctgccgcgacagacaacaatgccacgcgcgaacaacctcctcttattgagcgtgctattgatgcgatctgcgaatgcttcgagaatgaagcaacggccgttgagatccaacagcagatcatcaaatcgctattggcagcggtcttgaacgacaagatcgtggtgcatggagctggtctcctgaaagccgtccgccaaatctataacatctttatctactccaaatccagtcaaaaccagcagatcgctcaggggtcgctcacacaaatggtcagcacggtctttgatcgcgtgcggacacggatggatcttaaagagctccgagtgcgagagctagaaaatccatcctcgacccttgatacatcggcgagtgacgtgggccaaaactcggagacggctgatcagcccgtcattaaagagcccactgctgagaagctcaccctacagagttttgagtcgcctaacgaggttaccactgtcaacgataatgcgccgactacagtcacgcgtgctaagcggtcaacgacgaggtcaatgtcgggtatccccgaggaaaaagatgatgatagctcggccgaggacgatgtggacgagatttacgtcaaggatgcttttttggtcttccgagcgctctgcaaattgagccacaaggttctgactcacgagcagcaacaagatgtcaaatcccagaacatgaggtcgaagctactttcactgcacttgattcactacctcatcaacaaccacaccgcaacctttctatcccctctggcagcaatcaagaacagctcatccagcgtggatggaatgaatctcctgctagctgtacgacctcatttgtgtctaagtttaagtcgcaatggttctagcgctgtgcctcatgtcttcaaagtctgttgtgaaatcttctggctgatgttgaaggacatgagagtcatgatgaaaaaggaactcgaggtgttcttgaaagaaatttatctcgccattctcgagaagcgcggggctcctacgttccaaaagcagtacttcatggagattctggagaggctaggtggtgatccacgggctctggttgaaatctatctcaactacgactgtgacagaaccgctttggagaatatattccaaaagtatgctctactcaattcttgattttctttggcatggactaaccttcttagtatcattgagcaattgtcccggtactcaagcgtgccggttgtaacaacaccttcacagcagcatcagtaccaagaacaacacactaaaatgtcagccattggttctgaatggcaccatcgaggaaatcttcctccttccttgacaagtgcacacattgcccctactccgccgtcctcgatgcctcatattccaccggagtacggattgaaacagcagggtttggagtgtcttgtggagatactgcgctcactggacaactgggccacacatcgcatcgatgaactgcccgaggcagccattccctctaaatcgatagataactcccgtgagtccttggacacaagcgtgcttgtttcaccgcatctggagtccttcgagagtgggactggccggtccacacctatgcccgaagacgacccaaaccagattgaaaaagtcaagcaacgaaaaatcgctctcacaaatgccgtccaacaatttaatttcaagcccaagcgtggcatcaaggccttcctgaaagaaggtttcatcaaatccgagtctcccgaagaaattgccagcttcctacttcgcacagaccgtattgacaaggccatgctgggagagtatcttggtgagggagaccagcaaaacattgctatcatgcatgcttttgttgatttgatggaattcacgaagcgacgcttcgttgaatccctgcgctcgtttttgcagcatttccgcctccctggtgaagcccaaaagatcgatcggtttatgctgaagtttgccgaacggtatacaactcaaaaccccaatgccttcgctaacgctgacactgcatatgtgcttgcgtactcggtgattctcctcaacacagatcaacacagttcgaaaatgaagggccgccgtatgaccaaggaggactttatcaagaacaaccgcgggatcaatgacaaccaggatctaccggccgaatatcttgggaccatttatgaggagattggaagtaatgaaatcgtgctatacaccgagcaggaacatgccgccaacttcaaccctccacccccggctcccactggccttgcaaccagggctggacaggtgtttgcgactgttggacgagacatccagggtgagaaatacgcacaggcttctgaggaaatggcgaacaagacagaacagctctatcgttcccttattcgagcccagcgcaagacagcagttaaagatgcgctttcgcacttcattcccgcgacatcagatcgtcatgtcgggtcaatgttcaacgtcacatggatgtctttcctatctggtctgtctgcaccgatgcaagacacgtccaacctggaaaccatccggctctgcatggagggacttaaactgtccatccggattagctgtgccttcgacctagagactcctcgcgtggcctttgtgactgccttggcgaagttcactaacctcggaaacgtgagggagatgatggccaaaaatgtggaggcactgagagctttgctcgacatcgccttcaccgagggcaaccacctccagggctcgtggagggatgttttgacatgtgtcagtcaacttgatcggctccaactcttgagtgatggagtcgatgaggggtcgctgcctgatgtttcaagggcaccttcagcactttctaggacgccttcatcagcagatacctcccgcagatctacgcaaagtacacgacgccctcgccctcgctctgtgaatgggccaaccgctttccgcccagaaattgccatggagagccgttcggcagatatgattcgtggcgtggaccgtatctttaccaacactgctaatctgtcgcatgaggcaattattgacttcgttcgggccttgagcgaggtcagctggcaagaaatccaatcttccggtcacaccgattcgccccgaacctacagtctgcagaagctcgtcgagatcagctactacaacatgactcgggtcaggattgagtggtctaagatttgggatgttttgggccagcactttaatcaagttggctgccactctaataccatggttgtcttctttgccttggattcgctccggcaactttcgatgcgcttcttggagattgaggagttgcctggtttcaagttccaaaaggacttccttaagccttttgagcatgtgatggcaaacagcaccactgctgctgttaaggatatgattctgcggtgtctgatccagatgatccaggcccgtggcgacaatattcgttcgggatggaagactatgtttggtgtctttacggtcgcagcacgggaaccctatggtaagcctcgctgctcaaattaatccgtccctcgctaatgtatcaaacagagggaatcgtgaacatggcttttgaccatgtcacccaagtatacaataccagatttggcgtagtaatcacccaaggtgcctttgcagatctcatcgtatgcctgactgaattctcaaagaactccaagttccaaaagaaatcactgcaggcaattgagaccctcaggtctaccgtcaccaaaatgctacggactccagaatgtcccttgtcacaccgtggtgcttcggcggccatcttccaggacaatggaaccaatcttgctaaacaacttacccgtcaatcacaagaggagcagttctggtatccgattctcatcgcattccaggatgtactcatgacgggggatgatctcgaggtccgctcacgggcactcacatacctctttgatacgctaatccgtcatggtggcgatttccccagggacttttgggatgtcctttggagacagctcctctacccgatctttgttgtcctgcagtctaagtccgaaatgtccaaggttccgaaccacgaggatctttcagtctggttgtccacgacaatgatccaggcgctacggaacatgatcactttgttcacgcactatttcgatgcactggagtacatgctgagccgcttcttggaactgctgatattatgcatttgtcaagaaaatgacacgattgcacgaattggcagcaattgcctgcaacagctgattttgcagaatgttgcaaagttcaagccggagcactggtcccagattgttggggcattcgtggagcttttcagcaaaacgaccgcctacgaacttttcacggctgctgcatcgatatctaagccgacagaggcagttaatggggacctcacccaatctccagatgctgctgtagcaacaaaagagatgcctgatgcattgcagcctaacggatcccaaagcgcatcttctctccatgatcctcctgtccaaagtgaagcccgcgccgaattggaagactatcgccctcactcagaccagcagcaacctgcggctgtcactgcagctcggcgccgttacttcaaccgcatcatcacgaactgcgttctccagctgctcatgattgaaacggtccacgaacttttctcgaacgaaaatgtctatgcacagattcccagtggagagctcctgcggctcatggggctgctgaaaaagagttatcagttcgcgaagaagttcaacgaggataaggacttgcgaatgcaactctggcgccagggattcatgaagcaacctcctaatctattgaagcaggagagcggtagtgcctctacctacgtgcatatcctcttccgaatgtatcacgacgagcgagaggaaagacagagcagtcgcgcagagaccgaggctgcactcattccgtaagttcattatctaatattctctccttgttcattgctaatttcactagactctgcgcggatattattcgcagtttcgttcgccttgaagaggacacccagcaccgcaacatcgtcgcttggcgtccggttgtggtcgatgtcattgatggatatactaacttcccgcaagatgactttaataagcatattgaggccttttaccctctcggagttgagcttctgagccgtgatctcaatccggagattcgcgttgccctccagtctctactgcgccggaccggcgaggtccgactaggcattgctccgcccaatcccctagacgtccccatcagcccgcgcagctccgtctcccagaaagcctcgcgccgcgatagccaggtctgacttactgcatgatttttttggatatcctcgccgcgggcttgattttcggcgttctataacccgactcttcggggtcttgtgttgtcacacgagcattttgttctactttagatgcatacctgctgctgtattgataagataaaatatttcttgacttgttttcttatttattctgtacttcctctagagttgggatcttacccggctcgtaaaaggataatacaccgtccatgtccttttcagtcatccctacaagctcatcaaggctccatgtttcgcagactccagacatcctataattattagctcacacttctttttgaagaggattgcaactcaccatttcattctcttagggccttggtcaggattcggcgcaatctcacggagcttcctccgtagctttcccacattctcaatggctgcgcccgtgttcgccggcaatgtctccgcgatcttcttgcgcacaatactggctaatttgggcccgttgccatttgtgctgaccatgatctgcaatggcccatcgcggtgaatactcccaaaatagaaatcgcattcgggcgggacatcagcgatattggcggcaattcgcctctccttgcaaagtttccagacttgtgtcgaagcctctgggtcgtcaatggcacagagcaccatgtccacattatcgaggtcggatggctcaaaatttcgatcaacgtgtgtgacttgcttttctgccaccctgaaagccacttcttcatttagtccagcggctggacaaaccacagtgactcgggcatcggcattgagaacgttgagaatgcgccctgcagcaacctagcggagatatgtagatcagtcctcatcctttaaacgatagatacttgctatcatgtttgaccacgtacctctccacctcctacgactagtacatgcttgtttttaatttgccaagcgagtatcaatgaaccaccaccttgcacttctgggaactttgacatggtgggatgtgggaataatgatgcaactgtcccgtttatcggctccgataaagaaaaaccgcgtacggtgggcggtacacaccatccccgcattattcccgagcttttcccttctgaacttttttcttctttttttttttcatcctcctttcacgtcactcgtgtctttttcttaaattatgcggggcgtccagatattttcggggaattctcacccccgtctcgcagagactatctgcgagcgcttaggcactgtgcccgccaaagctaacctaggaaaatttgccaatggcgagaccagtgtcgagatcggtacctcagttcggaaccaggatgtttacatcattcaaagtggcagcgagaagattaacgatagtgttatggagctcctgattatgatctcagcgtgcaagggtggctcagcgaagtccattacaggtatgttgccgacgcctccagatacaaaagcttaccccactaactcgtttctctagcggtcatgccgtatgctgcccgtcctgtttgattccaatcacagacaatgctgactctcaaatgagatatttcccatactcgcgccaatctaagaagaagagtcatcgtggtgctatcacggcccgcatgctcgccaatctcctcacgatcgccggcgtggaccatgtgatcaccatggacctgcacgtatgtttctatgcgatgttgagttttgtaatatggatattgatgggctcctaggcatcccagatgcaaggattcttcggaaagccagtcgacaacctctttgccgaacccttcattgcccgctggctccgcatgaatgttccctcctggaaagacgctgtggtggttagcaagaatgctggcggaaccaagcgagtcacatcgctggctgatactctgaagctcaacttcggtatcgtgacgacagatcgtcgacgcacgaaggtccccgtggccactatgactgacagcacagtcttcttcgatgccgtggatgatgatcccatctcgagcaaggacgtacagcctttcgagcttcatatgcaaggttctaacagagcacctgccacacctcccattccggaagagccggagccaatcactcctcctcctgtgccatattttctgcgcccggaaaccccacctgcggctcgccgtctatcggagctggaagcagcatacgagtacacggacgtccgtgtgcgggatgttatcaccggtcgtctggtgcagggccatttggttgatgatgattatcgtatcagcgaagaattacagtctggcggcaccacaccgggagctggcagcagtaccaatgacaacttagaggctattcctgatgctatggttaactccataatctccaacatctcgtcgcagcctcctgatcatgccctcggtggctcctttgacgcagttgagtctgacgacgaagctagtgtctgcgagggccaggtcgatgaaaggaccatcacgctggtgggtgaggtgcgcgaccgagctgtcttccttgtcgatgacatgattgacaagagcggatcgtggatcgcggctgcagagaccgtcgtcaagcgcggtggagccaacaaggtttactgtattgccacccacggtctgttcggggagaactccttagatcagatggaagcttgtcgctcaatcgaccacattgtcgtgaccaacacgttcccgatctcaccgttgatgttgcggagatcaaaaaagttgattgttattgatgtctcgagtctattggcagagagcatccggagacaccattatggcgaaaggtttgttttcaccgaccctggtgtcgtgtgaccatccactaacaactagcagcgtctcggctctcttccaccttaacgactgatgaggcatatggcagtaacgaggaaaaataacgaaaccaagcaaagagagacctagatactttctctagggcgtcgtctttgcgtactgatatgcaggttcccctgcaaccgttgatgacatgatacctatttcctatcaaatgaacgacccgttctgaacctctcccccttcctcgttcccggactgtcctccccgttgccccctaccgttcccgacctcgtaatgtgatcatatcacacccctcaaaccagcgatgcagtccactctgggttctgcaggagcatctcgttttccacaaggtgttcttaacggagcgttggcagattaaaccggatcttgttttcttacttcatgttgtgtgctcttcggagtctacagcatggagaagtcacccctttctcagttcttcggaacgattgacctcgcggttgtggaagtggtgcaagaggcgatctcgaacataatgtaattcgatagcaaacaattcacacatttttcacattgggtcattggacacgttgacattttcaaaacttcccggttgagacggtagacctctggcagtgccgaggatttgctttccagcgattcttcccgattttcttgtcatgttgacttcatttccgtcgcaccgatgcggttggccgtgattctggaagccggttggtgattcggtcgtggtctggtgatcgccgagcccagagggtgtccactacgggagtgtcggtatctacggatggtacacggctttcaataagggattgtcggtgtgcacgtttccattgatcgaccgtgggacagttggatagagcttagttctcactttccaggcattccaggccacttggcgtgatcgattagtccagggtcgattctcatctcccgagcagatcttgaacggtcatggctggcctaatttgcaatctcaggtgtgacagatggacctaagatcactcaagcattccttgcaaacccatcggaagtgcagcctttgtctgttgagaccctgcccatgtccctttgtatagttgagtacccctttaagttggtagttgcagagaggactcgaccctagaaacctaccgttgtgtcaccccaattgggctcctctcggtcgttttggtattctgtgctcatttcatgctcttgtacacttgtacaatgagaaaaagaactggaactgccccatctagtcgctggagaagatcttggctagactgtggtagaattccccaaacaaatatgtggactcacggatgtgacagagatcacaatcctatacgagagactcaacaattccattttcttttctttgtttttttaattttaattttaattttcttccagggctttgcggctattcgataagcaattgggctaaggcaggcgccaaaccggcacactaatgccgccggggggtatatccctgtcacttgatgtgatcagctcgaaggcaaatggtcgaattggatggaatcgttctgaaactgagattgaaactgaagctaaaattgaaataccaatgacaagagggaaatccatgtggatctctgttaagcgaagttgatgtatcaacagttgaagattaggactttcagggggggatctcaaggataataaggtagatatgtcaaaagggcatagtaaatacaataggaagagataataggagatcataggaagatcatactctatgatgtggattatagccaaataaccatctatgtatgctaatgtgccctaatgtactccgtatatacgctaactagaatatgcattctcgatcggaaccggattgctgggatgcaaagatccgatcgaagagaagaaaaaagaaaaaccactagacttgccaattaaccaacatagaaacctccgttgtcagttcaatccagctcgtcgggacagaacatatctcgggtctatacaattcagctccacttcggatcatagtcggagtggacgacgatactagtcatctctatcatatttattgacttccaattaggttaattcccctttattctatattctgaaaacgccacactagtcccaactcttaaaaataattcaaactaacaagtcagtcgggtctcttccgtccccccagctttctcggaatcaccctttgcatcacgattcttccaatcatgtctccccgatccctccccatctggaggatcgaaggctgcatctatttgctaaactaggatctacctcgcttcgcctaagtttctatgtaagagattccaatatatctatccatttgtatccatttggatttctctctcatatactccgtaaataaacacccttctgtctgcttatttctttacccattctattaaatttgctttttctttcctttttttctgaggaactcaattgatcccggttacatgcgtcatcggctttgtgcgtatttcggctctttagttgtcgactggttgcatctgggatcctctcaccgtgatctctggacagaagtatataatgattgatttgtcctggatttcgagtctcatcttcttcatcccttgacccatcgacctcctcttccccgctgaactctgtcggaactctgctaagcccattctcctcttactatattccattggtgttcaatccaagtgcctggaacctttctccgctttttcagtgatcgacgcagttcccagtcccccgggttgtgcttagtctgtgagtcgcagattttgacaagcaaaagggaaccacaagctaactatgacagcttctccaagtctatatcaacatggccaaccaatgttccggccacgtctttgccattgtccaggctaccaatggcaacatcttgacctggcgctgttccgactgcaattctggaccatttgtggctatttggcgttgcaaaatctgtggtcattgccgctgcaatgcttgtcacaccaataagggataggcggaatctacggtaagatccttgttacaaattctatgatttgacattcttagctccttgcaagaggcttacttccttaaagagacgtctgcatttcccttctagcatttacaggactgatctgccattgatctcccactctgcatgaaccctgtgcaagggtagttttaccaccataatccctggtgttgggttttgattcaatccactttcttcgtggctcggttggcgtgtgtttatgcattttgatgtgttccaaaaagtccccaaaagtttttgatgcactgcatcttgcatccacaggagttatacttagagcttttctcttctttttttttcttttgtttctctgttttctcttcttctggccaatttgtattctacttggattttgatttcctcagggaaagtgtgacattattttatggattttatatcatgtcgtttatactacaattatgcaacctaacacggctactctaacacctcgatggggagtgtgttgggccagtcataggatgtactttatagcacctcgtgatccctgtctatctgaatgtagggtcctggtatccccatcgtactataaaaagcagagttcagggtttcgctttcggtttcgcacctgtggaaataaaagaaatagccaatagtgtttaccataaaaatattacactaaaaagtactagggataagtacaaaagtaccctgatattcattgccccgaaaaaagagtccattgctattcgaaggaatatttttccagccattcaagagctaatgagatgtatctcttttttggcggaattacggttcagtgaatccgcgcaaaagcaaagatactatggagtagataggaacaaataggaacaaatagagtcaaaatagagagaccaagggttcccagggaggtgggacaactctattacttctccacccgcgacgggccttttgggagatttgcatttacaaaagtactgcttagggcttctatagggttgggtgtgggatgtactgaatatgtactccgtactcttcttttattgcaaagatggatataattcgcattatctttaacaatgagaacagatcgatatatgtgaaaatgaatgcagatctcctccttcggcggacttaggtgtagatactctgtcgaacaattagcaaccacgcaatcataagaataagaacaaccaatcaaacctacctctgtaatctgattgacagccaacccaggctctgccatttcagcgtcgcgcaggaactccaacggcaaccaaacaagatgacccttgatgagatccagcttctcccgcacatccttggctggcatatacggatcgaacagatgtccctccttgtgcgtgccccgaggccggaaattgtcgtagtcctcgaaagtcttgatatgatcatcagggtccgcccggaacaacatccgatacgcctcggtgttcccggtcgcttgcgacgtccaggtgttccagaccgcatcgccgagcggatcgatcacgaactcgttctccgggccctcatcgatccggttgagtgacacatcgggaggttgcgcgttcgggtcgcccgaggcgtcgaattcttgtgccggcagtaggcctaggtgctcgcgccacagttgtcggcggagcgtggcggccaatcgggaggcctggtatggctgtccgttcatgcggctgtcgatgaggtcttggtcttccattacgatggccagttcgctgtcgtgtgagccaagctgggactgtggggagtggatattagctgatgatacagaccgggaaataaaaggaatggaatgcgtcagatgtgagagggatgcggtgctggtgtgtgtaacctacccggtcgttgatgttggcgctgccgcagatgatcgtgcgatcgtcgacgatacacaccttgccgtgcacgtacagctcctcctggacaaagttcgccttttcggcctctgggtcgccctcccagacctcgttggacatcttacccccgttcaacatgctgcaatgcgatactgaatccttgctgtggaatccaccgtcgatctttccctcggcctttctcttctcgaccgtatcttggaaattctggagcttgcgcagggtttccttcttggcattttggtcggctgcgtagtccttctcgttctcgtcgccgtctttgcccaccgctgggtgtacactttcactcatgatggtctctgcgataccgcgttggatatcctggtatgtgacaccggcttgcttctcgagatcttcgagatcgggcgttttgttgattcgatcataagcgcgcagcgcgaacacgaagacgtgttctgaatgagctggttagacatgcaaccgaaaccgaacagaacagaacacttacctcttgggtcaataccttctttctcgatctgcccaaagatcgagtgctcgccgcgacaaatcgacttgtactggtagtccatgatcgcccgagtacccaacgcagcattgtcacgcaaatcaccagcgaatccaggaatcgcggggatgacaatgatcacgcggaacttgcgaccctctttgcctgcgcgcacgcaagcctcgacgatcgcacggccgatcgtgttgaagatcggacgctgctggtcgccagtggcagtgactatgaaggttagcaaagcacactgctagaagagaatgcagacatactgaagaactggttctcaatatacacatagtgctgggcattgcggatggtctcgcagtacgcgttttgaatactgtgctcgttcagaatcccgctgctccagtcgtcactgctgcgcacgatttgagcgcgcacagtgcccacgttaccacgaggcttggacgacaggggcgtcagcgggtgctggacgtattgtccgcaggggtacttgggtcgctgcacggcgatgatatcttcttcttcgcctacgagaccctccatgagtagccaatcgacatcgtggctgcgcttgtatttgtcgcgcttgatgaagttccaacgcagaacaaagtgttcggcaatgtcgtacacacagtcgccctgcaagcccatggccacgtcgtgccagggcatgcgaccaaagtcgactttgctgacttcgttgctctgccaatcttctacgctctggaagtccatgatccggttgttgttgaagtcctgtcctgggaaaatgtcgccccacaaacctgttgggtggacatcggccaatgggtgctggtttgcgtcccatcgtccgaagcatagatcaatgcctccgataaaggccacattgtaatcaatgacaaggaatttctcgtggtgcgccttgattattgttaattatgtcccaatcagtacatgtgacgcacatacccagtaaagagtcatatcagctgcgttctcaaagacattgtggtcggggtggcgcataactcggatattgccgtagccaggagctccctcggggcagaggctccgcaaggcatgtttagtgtgtgcggaattacatgtcagggcttggttaacctatagacaatcagtatatttctttttcttgattggaggaaaataccaacctctttgtagacaatgatataaatcttgacacctgcttcggcgcgtcgcttcaagatctgatccaatcgccattcctggtgctcgacagggggacggcgcaagaagagttccggagagagccaccagtcggcaatgtagatagtctcggtggctttctccagagcttcggagactgcccacatgtaatccttagcatcgacataccacttgatgcgattcccgtcgtggacgggtgcaaaagactggaagcggtgtgactctgcgatctcagcgcgcttgcgatctgtcgcttgttcgtgctcctcgtcatgccgatgattcgggtttatgatattaaaaaacttgccgactttggccttaaaatgtgtagcctcggctttgacctcgtggatatgggtgtcttaagacaaatcaggtcagtttttcttatgttataaaatgtcaatctgccgacctttgagagacccctccagatgatcaattccttgtcccaacttgtccttgaatctttgcatcattgaggcctttagtggagaaaatagttagaagagggggagggggggaagatctggagataatactggttccttaattcgtgacatcacagccctactgggtaaacatgcattgatctgatttgtctccctaccaatgccaagggaaatacagcaacgccgatcgaaatcctccacctgtgctattcttgttattgcctatttagggttgggccgcgtggtggtgtttccgcggttcctaatatcggaccactcgcttctttcttggcaaagtgtggccttagaaattggttgaattagttatgtacaacatataacaggaacaaaatgactaactacaaacagcagagatctctgactagttagttatagagtcgatcgtatagaatgtttagcggtgtatttggtggagatatatccacgatactacgtggcagcatccataagaaaaaagaaacaaagtgactagtgaattttggagataataaaagacaataaacatggaaattccttgattctgcttctcactagtctacctaggtacagtctgacaaccagtattatggctataaaagtgagaaaaaaaaaatataaatataatgtcacctaaaggctaagggagcattttaagagacatcgtagttacataagggcaatgcctctaatattatcccaagccaactacataatattaatatttactccgtaactatagttagttatagaggcgtgcggtgtacggagttaagtaactagtaggttgacccaggttggaaccaatgacgtaattggatctaaactggagccctagagttcctattcgcgccatactgtacacccactttgagattgtttatttgtattagaggtgagagggagaaaggccctacagatgctgtccaagctattattgttctagtcttctacctaggctataagtcattgttgacatggttcacgtgatatgaaccgccttggagctcaatttcaaaacaaccacatttaggactatagattatctacaacatgaaatatatttgtgatagtatcttcccccgtttccaataaaccataagtctatgttagaacgtgaatcattgctcagctcattgttcagatgttattgtttggcgggaatgctgaccgccaccacgtgactggatgggaaaaacaacgttgtcagaggaacgggccattttctgtttatcctctctcgactcacacaacgcggccagcctttcagagccccaggctcgcgattagtcgacatttttggttaatgtgctagcatcggtttggatcgtatattttgtttgccgggtgcacctacctatttttggatttataaacgttgcgaaacgagacacacgactagccatcgccctggttaccggctcctccacttactaacgcaaaggaagcaagcagatcatgatgccgccagaattaggtaagtgcaatgcaagactaaaaaaactctgctgcaggtcatttggttccccatactaacgtgtttccaagcccgagctcactcgcagggcagtgtggtgtcccagacaacacagattgccaaccaaagccggccaggtacggcagaccctgtgcgagcacgctccgaggccctctcacgggctagccgtcgtcctcggtctagaggatcaacagcgagtatccactcaagtaccacccagcaaacccaagaccagcacctcgacgggttcccgcagttcatgccatcgcaagtcggatcaggccagcatatgttcaacaatccggaggacatgctaatacggtttgggcaccagctttcacatcataacggtgcaccgctggatcaatcgatgcaagacacccaccccgggatgtctcgagccgaagactttccaaatcactcgatgcagggccacccgctttcccatcaccctatacagcccgaacttgcaaacggtttgcccaatgtacccgttccccaataccagccgatgtatgatagtggtgttgagaaccacctccctgatcacatcgtcgaggatcaagaaatctcggagccaggggctaaaaaaaaaagaggtgcgagctcgacagtagctaatgacaacgagctgcgaaagctgcttcgtcagtatgagggatggagtctcaaacaaatggcggctgaagtcatgaagaatgagggtggagggggcaaggctgagaaagtgaagcaggtcttcgcgatgatctggtaaggcacattgccgcaaattaactgcaacatttgtctaacagtatacacaggctgagagaaaattgccggaagagcagtggctccgtacgtcgtgaccgggtctattgctgctatgcagagaactgtggaacggaacgcgtctcagtactaaaccctgcatcattcggaaagttggttcgcatcatcttcccgaatgtacagacccggcgtcttggggtccgaggcgagtccaagtatcactacgtcgatttgtcggtcattgaggaaaagcaacaaaagcttgcgcctcttaacccacagattgcccatcatgcaaacggccctgcttctttgccctccagagctgccagtgcgatgcgctcgagaaggtgagatataactgacatcaatctttatttgctctcactgacaaatgactagtgctagcgtacaacaaccgactgccgatactgccgtgttcccatctcccacaacttccttcgctcctcgattcccgaataattcatcttctgccgactgcaattgccaaggccacacgccatctgggccagatgccacaatcacccgcgataatgtagcccagcaggctgggaaaatgatacatcagatgcttcagttcccgatggatgagaacaccgtcgttgataacgatacccttcaacttcccgatatccgtgcatacttacctgcaaacaccgacttgaaagttgctgcagctcttgctgccctgtatcgctcccattgcatttcggtcatcgacagctttcggtattgcaaggaacgaaatcttatgaaatatttctccgctttccatggaacattgactgttcccgttcaaaagttattgacccatcctaaccttgctccatggatcaaggaatgcgattggatgatgtaccagaagatgattgcgtttgtggcacccctcacaacccaggtggtccctaagccagtcctagacgcttttaactccatctcacaacggctttgcgggcacatcgctgaaacctttaagacccaaccaacccatgtctccttagcacgcttgattcccgcgcatatcttctgcaatctcctcaagcatatgcttgatgtgaaccaggctgccaatgccgctgctgcctggctttgccacccggataaccgaaaccaaatgtggacggactttaagactatggtaaatcctagagatatgatgaccaaggcaaacatcccaacgtgtgcggagctagcgacggagcaaattctcaagcatgacgttcgtgcgctcttgactccattgaatgatgccgacccctcggcaagcttgcttttcttcacgcaaccagatagccccgattctgttgaggcgcacaagttccctgtagaaagtgctccgggagacgagtacaacttccccgacaaatgggttcagttcatcctcaacatccccgctgccttttccaaccaccgcacacagtgtgtcattgaaaaagttgatgccttgtgggatagcgtgttgcaccggcttaccctggccggagcaccaagttttagcgcgtggtggatgacaaaagtcttcttccacgagatgatggtctggcaagcagagaagggtgggttcatgtgcaacactcctggatcactgcaaagtgcgacgtttggccctgaaccactcggccattttcagatgagacaagcgtctgttcccgaggcatccccttttgagaacgattcaaaacctcacccaagtcctcctatggctcacagtggtcatcaaagccagcctcccagtcagcactcggatttcaaacaccctcccagcgagaagcgactctctcttcaagagggcttccaaggacataacaatgacgacagcgcaattgaccttgaggatgatactatgctgctagcagttggtaaatacggtgatatgatggtgtccgatcccgcagatgccgaaggcgatgtcgtcgtcgtctagtaatttttgatttctgttcatgagttggagttggatatcccttgattctagaggcttctctattggttgtggatggcgtttccacgattttcctttgttccttttttcatctcctttgtttgcatgaagcgacgagacatgagcaatgaggctctccagtcttccttgcaagccggcacgccggatgctttctttgatcaacctacagcatttaattggcgtggcggaaaccaggaccaacttggttcttgcttctcctattcctgtttgtttactttcgggtctcatgttgggtccctctgtacatattacttgtggacgtaccttgatcatggtgcagtactctaatgtgcatgaataactgttgacacactttccgtatgacctttaacttgattccatatcttctgacttggcaagacataattgggaagatatcctcagattgataatgccattggctcctaagtccgctgttgttctttaaccttctttgcccaaccaaagaactagcttttatgaacccatgtgagactagttatcaatgacattcatagctgtattctagagaacggcacagaatctagagagcagtacaaaatcagagaacaacaggtctctggacatgcatagaaacctcgaagtcctctctctgtacagtctatacttttcaccatctacgtatagcattcatacattttataccatcgatacaagaaacaaacattcaaagagcaatgacgccaacaacaccaaagacaaagatagacattgttaacacgtcatgaaatcagagtgtagtagtaatcgaaaaaaaataaaaaacttcgctccttccggttgttcaatcccaagacgttcgtttggctttaactacgtagtcacactacgtagtgagtgagtgcacttcgaccggggaatttacaattgaagtaggtattttagagtaaataaatgcttcgcctgggttccggggaatattgttcgtttagagttgtagtgtagtgtagcgatcatgacattttggtcgtgaaagtatatatccgaaaacggagtacaacgtacgtagttacatgtagttgagcataagcgtagggtttagtgtgaggttcgcagtagatagttaccccactgctatacattaggtacattgtagatcaattgctttatgcgccccggacttcatcgtggagggagtcattgacgatgtatccgcacctttctgcaatatagctctattttcactgctttaagatctcaattttgatttcgtgctctgctcactatttacagtttagctacgtaggcagataacctcgaacgatcttgtagaatgctggaattggagtcaatagaagcttaaatcaattctttttaaacgtgcagccgctagcccagatcaggttagggtttattagtttagatatcgaaaagatcaaagaagcaagggtgatatttgcaggaagatagcaaaaaaaatttgacatatgatcaagtacagttgttcgcgtagataagatggatatataaacaagtacatgaagaagaatcgcttctactccggacgacaaataagtcgggggctcacgagacaggctgtgagattgactgccggaccaaatgaccaacacgaggcttcacgatggacccggcgaagctgtgctcggctcgcccccgactcccaggctcgggactaccaatactggctgacggcagtgtcgtaaacgcagagtgcccatcccaagcagacacttggtagatgaggcatgcaagtattaagatagatgaaatgtaaatcaagattcgcgcccaagtcggttcatgagaatgcttaggttttgtcttccttgggctcctctttgggctcttctttaggaggctcttctttcgcctcgtctttggcttttggggagaatctccatcggtcccagttctccagcacccaccagttggtgacgtaggctgcatggtagagccagttcatgatttcttcatcctcatactcgtcctggaccgcggacgcgagatcggcaaggctgaagcgctcgatcgggctcagctcgttcgggtccttggacacatcagtgaagcgccattccacgtcgttgactagcggaatcactaggcggaactcgggacgggcggccgaccgaacagagagccatgaaccaccagtgttcatgactgtgaagtgccaggcttcgcgtccgtcctgcttgacgacctgcggtcggatcatggattgaccttcgtacagcgagcgaatgtcgcgtgcggcacgcgtgctgtcctggctgagggatgccgactcgatcaacaagtcgatgatggtggggacgatctgggtgctgatgactggggtgtcgatctggacgggaggaaggagcgggtgtgcaatcacgatcggcaccttgaagctgccgacgtgggggttgtcatagggagtgataccgccgtcgttggggagggaaaggccgtgatcgccagccatgacgaacaaggtctcattagcgactcccttctcctccaggatatcgatgagctccgagagccaatcatcgacataaccgacggagttcaggtatcgattcatatcgccgttcgcaccggatttggcgcccatcatatcttcaaaggcgtcgttcggaattccccaaggatgatgggtggtactcgtgaggtgggtgaggaagagacgctggtggtcacgttccgcatcatcaatagcatcacggatgtactctcgaagctcagtttccggatagccatagtagttcacctcggcacttttaaccgggaaatgcttggcatcgggcttgatgatcgtctcttttgtctgtttatcgcggaatcccaagtgcggagtcaacttgaactgattgtcgtacatttcggtgaccgacatcataaaggtcgaatgccacggccacttggtgaagtcgtcggtctcactgttgatatccggttgctgactcaacgtgtcgaagacctggggcagacatggctggtagatatggtgttcgaattcgcggttgaaatcggcgaccagtggggtcacaccacagaaacttcccgtcaaactcttgagagtataggtggaggaagtgatggcatccttggcactgataccaccatacgccttgcggccgaaacgggtatcgtcgtgctcaaagccggtggggaagttggtcaagaactcggcagtccgggtgaggttggcaaggcgttccacaacctcttggggaatggtcttgttcttccaggtttccgcaatgcgtttgtacatgaagctgtccttttgcagagggaagatatcggcacgtgcactctcgagtttcaagaatacgacatgcttgatcttcacatcgccgctggctagtgcgttgtgaatctcctgcagcaccggcttgtcgaggttggagatgtgcaatgggtccccatgcgggtcgtagtgcagcgccaaggggtcggattgatcccagtcctcgaaaccttcgagcggttccttggacatccaggtccattgaggtgcggggcccaatgcagtgatcctatccagatactcaaagcgggagggtgtgccagcggtatcgacgggggattgacgctccgcaccctcaatgatggtggtcaaaggcaaggtggtggacatgtacatatagaccgggtcccacggtcgcataaagcggagtaagaggaagagactgaacaatcccaggacgagggcccgttgaggtacaccgtcggtgactcgcttggaggcggggagacggttgggtaggcgagcggtgttcaacagatgatccccttcttcgttatcgctgagatcatcgttgtcatccatggcgatttgttcgtagattcgaggatcgggcaggtcggcgactgacgatttagatcggggccagaagcgctgcaccaggggctccacgtgtgggcgcagacgaccaaacagccaccgaacgggccaggcccagacatgcaggatgccgcccgagatggcatggatggaatgggcagcgaacaatgagattgtgaggaggatggcctcgacgatcagaaatccggtcagaccggtcaggagggtgtgaatggcagcggcatcaccattgaaggatttggcttggcgccagtggatctcggcacctgtgaaaacgtagaaggaggtattggcggcggccatgaaggagacgatgagactgcatattgttagtgacgagattaattaattgtattcagatcaagtctaaatctattgaaaaagacccgaaagaatgtagcaatgcagtggaaaaaggggcacgtggacacttacctagacgggataaccaagatagcgagcagagcggctcccggtcgccacgcgaccttctgggccagaatgcgaaacagcaatagcagcatcacatcctggaaaaagaaggtgagaccccataggaatagtcgcggcaggggtagagaatatatatgagcgtagagatggagcaatttggcactgaataacgagagaacggccagggtgaaaaagtagcgacgggcaaagtcccagacggcatccagggtctcaccaggcgagagacgaacacgccggatgccgtggcttaaataagcatgaacagcgtgaacgactttcatggtcatatgaatgaatgaaatgtgtatatatatacttcacacccccgacatttaagaaaagaaaagaagaagaagtcggaagtaagaagtaagggagaaggaagccaagggtcttgacaagccgagtgcccaggtgggatttagtggagacgatgactgggaccattttaggtacgacatacgagagacgtgagacgtgattatatttgggggttaataggtgattatggtgttaatcatgagctacgatggattaaatgtgtattagacacgtatcctcctccgcttgactcttctatatcccatcttaatacctatattctgtcaattaccctccgcttcccccccccaaggcccccccaagccccgaaagccccgaaaagccaagacaaatgaggccccgctctccggaattgaaataaaaaaataaaaaatccggtttctcctcctttttcctcctcggggcttattgtgttcatcatggtagggagcttattcggttggattgcgctccttttcgagccattagcctttcaggttcctctgatcgaacctcaacccagactcaaagcagagaatggtatagccgttccagcagagggcccctggcaggagatcatcaccggccattatgcggttccccccgtattgaaaatccatgaccgaaacagtgtggtcaaatggagctggcaacgagaagatgtcacccaacccctgcctcctttgattcatagcggcttatatagcgggttcaacgatgcgaccgatatgaaatggatgcggggtgggagaagcatcgctgccgtctacagtgccctcgtcgtggtcatcaaccacacccccgaccaaccctccaccgataagaaaatcaccttcgcccttaaccgagcaaacgatgtcctacacaatgcccatactatcgagcccctgcccggtgaccgtctcgccgtgggaaccaccggacagcgaccctgggatggcattttggtctacaacatgagctcggacctccccctcgtcgacgaaccgcccgtattgcaaaagatcgaaggtctgcgcgcgatccacgccatgatctgggatgagcaggggcagatgctgtgggcgaccggcaccgacgccgccgccgatggctccgaccccgttccggcttacggtgtcattcagggataccccttcgatgccgagacgggcctactcagcatcgacgaagcctatcgattccgattccccgagtactgggatatcgacgtcgaatggggccatggatacagctggtgggccgggccccatgacctcgtccctgttcccaacgaacgggtattcctcgtctccaacgatatcggtctccatgccttcgatatcgataagatggaattcaccgccgcatacgacgaggtcgtcgagaaatatatgcccggcttcgaggtcaccaccaacgaccggcacggcatcaatcgccagggcgaatacgtcgagttgccgcagtcggacctcaaggggttcagtctcgctcccgatggaagcttcatatacacccagtctctatggcgactataccgggggaattataccagtctcgtggtggatggtgtgcgtacccagatcatgaaagggaatgaaatctatcggtcgcgatggttcggcgacatcgatggctggcccaaaccgaagacttagtgttttaacctgtatagcacgcctatgggctccacatataaatctgatataatgaacgttctagctatgactttgcctgtcatttacaatgccttgttgacttacaacatcctcgcctccccatctctctacatccctatttcgttagaatagacttcccaaccccggaagaggcgttgattactttcccattgtgccaccataagcaaataccgtcgacatcggatatccaattccatgtactccgtactcctccctaccagaccttccattttcagaaagttccaaattaagacaacgctactccgaatccgccatggccccggccctagtcagggtaggtgacgcaagccaaaatccccaccaagtccctgacaaccctgacaagataacagggctgatttgttggcggatccccataggccatcgataaaccctctaggctcttacctcttgcctcctaggtgcatggccccagattccgaatccgaatctgactctgtgcggtctgtgctgagtaatatattgcaatgcaaccccccgagccataatccataatcattaatacgagcttactacggatacgtcgtacgggcttatgattccgtatctggcgtgtttcagaatacggtcccgcttgcacttccatcgccaaaccataacggcggttggcgggtggaggcgccttcgaagacccgcttcgtacaatacataacaggaggcgatggatggtgggtgtcgatcgcacagccctgaggagattgatagggagacaggacccacgcgccggcgaatcagcacgagacccttttcctgaaataggtagttgctggttctggttcgggttctggttcgtacatctgtgggcggcgaatcggacgtgagcaggagttttctggcgctcgccactgccaaggctaggaacagggattgggaatgggctaaacgagtaagagatttttatgggattttctagcacttgggtgggagactgagtgcattcatattcatatcatgcgatgttagatagaattcgtagtatggtatggagtacggagtagcaaggaaatatggctagagtgattctagttaatctatcagttgagttgattatccggacatcaatcctccggtactgatgcgagggatccttctatccatatcgatgtattcatgtggctggaaaaataagaattctcagtcatcaactaagccaacctaggtatgagctagaatatctgccttgtctcgtaaacgaaagcgacgagatacaacgcaaagaccaagtcccgtcaaagccgaagcaagctgattgaagtcccagatcgaagaaagcaatctttccacatcagccaaccacaaaggatcagcaaacatcgacaaagctcacgcatcaacaagaccctttcgctttaggaatagtgggattttggctatcatcgctgcatacgagtagattgtgctgatagaagcctcgtttccgtaagccagatagcttagggccgactgtccgtgtgccggagagccgatccatatgactcctcgcctgtgtttgcacttccacctgttgttgttgagattgagtgtctggagtaaatgtcctatgttagctatctgatgctcccactgatcactttgatattctattcttacttcaccaaactcttcagtcatgtcggtggtaatgtatggatgtagcttgtctccaacgagcactgggacttgttagcagactgagattgcatgctaaaatccttgcaaggggcccttcaatcggcatgaaagaagtgcttttctccagtagcgatcaatattcatagggaaagtaaactctgagtactccatttcgggttggggttgctcacgtttgtcattcacgtcatcctccttttttcccttggagtccttagggttggagtcatactccagggattcatactcctcatccatgtcgtaatgccccttcctaaagtcgtcttcttgaatcactggaacaacctcaatcttgatcccgagggatttgaaaacggagtacaacacaaggtcagcacccttgagtgccctcggaagtagcattggagcctcatcggatgtatgaggataagcgtgagagcaatagaacccgagagcgccacctagggagagttaacttggtattcttcgtccaaataacggcatatcgcaaacacacccttttgcatgaagccaggctccatgataagttcttgcaagtaaccatatagcggaaagctcttgggatcaacaatcatgcttggtggaatcgatcctcccactggctcggttatgtaaaggttgtacgtcaaggtgatccgctcgccttccgttattgttttgatctcgtgctcgcagtcactatagaatgctgcccactgaatggcaaacgcgctctgctgatcccagtcaaacacaacctgtcttccctcgtgattaacgaccaagtcgccccctttgaactgagagggtaaacaaacgaccagcgagccgatttgggtcttggatcgcggcgtgtccacatgctgccggaaaagcccagatggtcccgagtaaacctatggttagcaggcacattagtattcgttgcagaagaggtattggattagcatacattcagcttgtataactcggcactcagtttccggaagggcaaagagtcctgcgcctctgtgttgaagttcggaaggagaacttgctccacattggggagaattccgaattccgctggatggaagctggtgaagaaatgttcagggtcaagctttccagcctttcgatattcagggtcgataacatcttgctgtcctctgccaaagctagcaggatcgcaaactgccaccaactgacgcaaatcatcggatgcagattgggggttggcgttcgcatcaagaggtagagccaattctcgcgcgatattatcaccatctgtacgccagcagattctcactggcggagacacagagatgggtttggaggacttcgaattagctgcgacatttgtaccaatggggacaagacctccacagacaaaggttgcagatgccttttttccgacaacgaaagcctccagctgtttacagatcttcttgaacgcgaggccagtcaatgatggaaccgcggacttagacctcttcttgctcgaagaagccatggtgggctaagatgggaaacagtagggaggaatgggaaaaggagaaggaggatagttaagtaggaggagggaggggagacggtgaggccataaaccacaaacaaccctggaagggaggtggttgcctaaagttggaggtcaccatgcgtgccagcctgaattcaaacaaaagatgtctaggctacacctcctgcctagtcaaaagaatgcgcgaatattccatactaccccagcgtctgactgcaatatgacgtgcaataggatgtcatcagcgcaaagagattaggtgaaaactaaggctcaagggtgtagttgtagctttctgggagtcagttttcaaccgtttcatacctcttagaatgaagttgtaatggccgccagactactccatctactccgtatggagtagacatcttgatctatggcttatatacgtggctatacgtacctactatattgcctcgtggggctttcctatcctagctgccgccgctttcatatgcttccaaggcaaagaaaggcattcgtaccaaatgctatctctttcgaccattgcaagctcttggtcttgcttgttaccgacttttcccatatgacgaagccccagagagctcaccaggaagacaactaccatgccagcaaatataatccaatacgcagcacgatacccctcgagaagctgaccgcccgtttgagaagatgtacttgtatcgtttgccgagccatcatcttgggcggtggaggaagcggctatgacggcagtgacaaccagtccaacacagttacccagttgggagatggtattgaagacactcccagctagagccatcgagtcatcagggaatgcccgagaaatgatcagactagacacagtctatagcactagccaaacgataagtcggtatttgcatctttcatatcagatacacaagttgaggaagttactcaccattgattggttttaaagttatagcaacaaaggctgcagctcaatatttccagttgggggaggcggccgccattaaaataggtgaaatcgcagtcatcagtgcactcatccccagcagcaggttgacattcaccttcgacatcagatgagcagtaactatgttggtggccacgccaactacagccataggcaagaagcgaatggaagcttggagggccgagatgtcctggacgtcctggaagaacaaagttgatatgtactaaaaagagttgaacccggcccatgtgaagaaaatggccacacagataagacggcagatttcgccataaagcatttagaatcaaggctggcctgttgtgctttacctaccatttcaccaaaagcgagaagacagggaggagtgataaagagataacgggtagcacgatgtattggggctcatacatattcctgtaggtatatgtgaccatcctatagaaatgtcagcaacattggataaggaattaaataaaaagatcaaggatgatccacgcaagtacataggatagcaatccaaatgctaaggcgagagttgttacgccaatccaatcaatattgtaagcaagcttataccctgtttcccggcatagcttcatcgaatccgggtccgatggaaggatcaagatggatccgatcaacaatacggcatcgataatgccggtgatgtaaaaccttcatcaccagctaatggtattggtgaaaacaccaccaagaatgagtcccaacacgtagcctagtggctgtcccttatgtcgctgcaaaagcaatgtacctctagcgcccaggtggaaagaacgcagtgactagcgacgtggatgtcgggagacacatagccgcaaagagccctagaagcgcacggaaaatgatgaattggttaccagtgcgggcaagtccacgagaagccgctcccgatcagccacattctcctagagccaaccacatctgcaacggagccgaatgctagcaaggtgcatcctgcagataaagcatataccgatgccagctagaagatcagattgtggtcgaggttgatatcggttgagatacgaggaagtgcggtggtcagaatttcagttcccgggacactgataaaagtgacaccagttattatgtttataatccagagcgactccaatgccgacttgccattcttttccaatgactcctcggatagaacgttcccatctggctttggcggctctctttccgtttccacgacctccttgtcgcgtcttttatcgtacgattccgccaacgccggctgttgtggtcacggtcgtcatggtcgcgaaagctgctttgtctcacggtatgagagatgaaagagaccattcaaggaatccggtgagaacaacaggtcacccagccctccaaatatgacggaaggaagttgagaagtggctgaggaaatcaagtaagtaggtaggcggcattcagtctaggtctacaatgagggaatattctgtcaaaggcggggaggcgaccaggtgcaggggtacgactgtgtatggcgcgtatagcgctcaagcctggatggcatgcctgaatgcctgattcgcgcctgatattgctgcctgattttagaccatagcatggcaaactatcaaccaatatcccgtacaaaatcttttttttccggtgtgttttaacctacatttccagtgaaagcagtgatgtcgtgccatagtgcttatattatgtagcctacatatactccgtcttctctgcctttttcattctctttttccattcaaaaacatatatatcttattcttggtcaaattgatcttcaaatgggcttgtcataatagaggaagctcgcagtgcgaactcgcaatcatatttcctgagtatatattcaaggaaagaacgataggcagtctggcatagcagacaagacgagagcaaccaacaacaccaaccttccaagtaggccagctagcaagtataggggatcatggagcctcagttatcattcgatcttcctagaaaagtagcaccttgcaaaatctccttcactctgagtctctaccagacatggtaaaccgaaaatcctttctgcctgaaaaacagtgctcaggctttgccgcttttttctcactgacggtccattacataatctgaatgatttgctcacagattatgagcccctgagcatcctgatccacccactgatcatcctctaagcactctgagttgctcaccgagtgctcactgagtgtactcctgagtgtactcctgagtgtagaaatgagcggtctgaggacggattacggagtaagtttcatgaataactataaatgcgacacgctgatcccatcacgtgcaaccctctcatagatcgcccatcaacgtgactagtgttttgcatctgtcgacagacgagtctcaatctaggtattagatagaggaattccagtacccacgtatacctgcctttaagcatattcataaggctcctatgccctaataatccgtataatgaacgttcccagtgcaactacctgcatatgatgtcactgaagaattgtggagtaatcttccttgaagaacaattagatgggcgtaacccagtatgaattcaggcattgatcagcataacttaagcattacatattaactaactagtatagatgataatatctattccgagtttaatttgaccgaaggccaaaagtctccgacaagcttggactccggaggaattccatggtcgtacgccatatcaaacatctgatttgtggagactttgctcggagaatcgccctctatggtttagcttgacatcaaattccacagaactcctagacggatctttaatccgtttatggtttgatccacacctatcagagatttcattggcagtgatgtgtaggaactggtagaaaatggcgcggcttaggggctagatgccgatcaatcaaagacatgtaaaacttgtcagttgtagaagctatttggtttaaaaggagtgccgtctgccttttcctcttagcgctaccatccttcattttcctgcaaaattacatttacacaacatcataatgagtatcacttttgaggttttccgcggctccaacgagggcaagatcgtggccgacaagaccactcgtgtcctggagcccaacgaggtctacatcgagacaacacactccggtctgtgtggcacagatgaacactacctcacttccggcatagctctcggccatgagggtgtcggtatcgttcgccagctgggccgggacgtcaccagtgtaaaggttggagcgcgtgttggatttggatacacacactacgtgtgtggaaactgcgagaagtgcttatctggtacgagttccaacccccaaaccaagaccgacaacttgctaatagtaaaccaaaatcaggctgggaccaatactgcgagaataagaaggagtacggctcacacgaccacgacctaggctcgttcagcggcggcaccgtttgggacgctcgatgcgtcgtccccatcccggacggctatgagtccgccgacgccgcgcccatgatgtgtgccggcgccaccgtctggacctgtctgatggagtacggcgtcaagccgatcgaccgggttgctgtcatgggtgtcggtggtctgggccacctagccatcaagctcgcttcggcgatgggctgccatgtggttgttttgtccagctcagacgcgaagcgcaaggaggctttcgagttcggcgcgtccgaataccacgtcttccgcaagggtgaagaactcgaggacttcaagcctgtgaaccacctactgctttgcggcagcggcagtgtcgactactccagcctcatcccaattatggatgtacatggctcaatctaccccttgactgtcgacatggttccctcgcccgttccccttgtgttcatgaatctcaagggcatccgtatccagggttcgcttgttgcatcgcgccgcagtctgcgttcattgcttgagtttgttgccgctaagaagattaccccgactagcatgatcttccccttgaccaccgaaggtatcgagactgctatgcagactctgcgtggtggaaagatgagataccgcggtgttctggttcgggagtaaatggtgatcagcatagatggagagaggttttaatagtcagcatgtattatattcccactagtattagaacgtttatagatatggcaagtgcagatgcaatacacgaaattgagacaatacctcgttagggtatgcttaaattatggcggttggtgagattttcacatagacatttttgagaatagaaaaattagggtatgagaacaacgttaccgacttaaaaggcttctttaggcgctaagatgctgatgtggactgtgctcagctgggctgtcttctgattggctcgtttatacgaggcttgccaagcatgcgtattcggcttcaggcttggcaaaccattaaaccatcctagtcccccatgtagctcaactcaactggctgtattttcgaaaattgagatcactgtgtaaattcacatgttatatagggtacttattcacggttctgacaatctgaacgtgtttatttacaaggccctcgacgggaaatgccatgaacaaccaaaaaaaacaatatagaatacatatatcaatcaatcagaaaagccaccaactcctggtattcaccggatcaagctgcaccatcatatttctgtcgtctcttcatagacttccattgaacaagtccagcaccaataaaagataggagtgcggcagcaacagacacgtagaatgtctgaatgacagcaatgttataggcgtgtaggacggagggcagcatatttttgggcacgcgctgcgataaatttgcagcgccggcttttattaacgcgtctgagttgatatttggagcataagccgttatgcttgcaacaaggcgattctcaaaaacggtttgagcaattgaaataaacattgcgccgctgagactctgtgcaaatgtaataatggcgattccgattggtatgtcctgtaatggcagtacagtctgaagtgcgttgatgcattgctgaaagccaattcctgctccaattccaagaatgacttggtatccaatccactccggatatccgctgtttactctgaacgtcgtacacagtccagaaccaaccgtgagaaatgcgcttccaacgaacatgagtggcgtgtagtatccaacaatatttaccaataaccctgccaaagcagagaacacaatcatagccaccaccatcggaagattgttgattccagattgtgaggctgaatcttccttgactgcttgaaaccagatagggagcttgaaaaatgttagcaatgaagctgataggactgtattgagaacccacatagtatccgaagacaaaaaaagatccacctaaaaatgttgcgtgaatcactgccccaagcacatttcgattcttgagtaaacgaggcggtactgtagcgtcgtcctgcttccagacctggatagcacaccacgcaaaaccgaatacgccgaatagaacaaatagggcaattattcgagcgttgttccagctgtatttggtgccgccccattgcaggcataacagaagggagacgacggcggggatgaatgcaagtataccaagaggatccattcgctgtagttgtccaaggcggcttattttgggttttggtgatgtagagtccttgaagaagaataaaatgacaaggccggtgaggacaccaaaaggtatatttatccaaaagcaccatctccaactgacatgatcagttaagagtccccccagtctatggttaaattagccgccatctacgatattggaataacgagacttacagtggtcccgtaattgtcgcaatcccactagtgctaccgatgattccgaaatagagggcacgccggtgaaggggcacactattcgcaagtacgagtagagcacccggggacaatcctccagatccgatgccggcaattgctcgcccaagaatcaatcccttcgatgttggtgtcactgcacatatcagagagccaagttcaaacaagccgagagcaatcatgtatgtccatttcgtcgagtaatatgtgtataccttgccaaatggtagggtgacggcacatgtggttaaaagataagcactggcataccacgacaagtcgcccagtgagttgaattgttcagtgattttgggaacggcggttgagaggattgtgttgtcctggtaagtcgtccgcattagctcatgaaatagtaaccataatcgtcaagcttaccaaggcgatacaaaaggattgaaagcaaagtcctatcaaaatcggagcaagctttgagcttgatggatagacttgcttttcttcttcatcatcactgtccccagttcgagcctctttcaatgggatgtcatctcgatttgtatagacttcatccccgaaatctttcatgcctgaactgtgtgccattaaactgcaagttaaatcccccagttgttattgcaactgtgagaactcatagaaatctgtttgatcgaatcatccgtgctgaagcctgaggagtgtttgaaataggcaaggtagaagctgccacattaaatccaagtgtggatgtacagaacttgccttgtagtacatcatgtacctacattactactgccggatgtaacccgataaagcaagggggttatatcttgatttctcggggtttttcactttgtcctggtcacattcttactggcttgattggtatgcaccacttcttccccgacaagacgcttgctagacccaagcagcatatacttatttgatcaaattatatggatcatgctctgaaaatatcacttgcccaattgaataatcagtctaataacaaataaggctgtatcatttgacatcgttagtcactcgaggttgatcacttccgacgtgatgaatctcgagacccttcattccagtgagactgtaacctcactaaacacagaacctatgatggctagatacttttagtaatgaatagcttcgaagcctgtgcaatattccgatggtcttccaatcaatgtgccacctctgtataaccaactaactcgcacaaagcttgtgtgcgttttatcattgtcaaaatacactgattttctcatacagaccaccaagggttatcgtggccggaccactgttaattgacgagataatatatatacaaagtgcaaattgatcgttggagccggaataaacgtggtagccacaaggccacaacatcactcattaaagtaccgtggtagcagcttgagcaagcctcaccaactacccttgtataatataaaattgtatactagatatccaatattgggaggactaattcgaaagactctagtgatcttattgtagtgcgaagaaaacataagattgcccgaggagactcagcaatcgcaagtatctcaggcctcatttcgaagggatggatagaaggggcacccggctaacaggtttctagccccgtcagattttttaggaattctgatccattaacgatgtaagtagaggagtgaatattattccgaggaatgcatgtgagctgattcccaactttattcttctatgagctctattcttaccaacgagaatcgggagctcatactaggaagcttcttgagctgtttatattatttccaacctattgatcacataatcttcgctcgccgatttgaggcctaggtataaagcttttctttctttttgtgcggattggtccacggatagaagatattatgacgagctcgaacgatttgtcagtgataatgtagcggaagtgcagtaagcctagattcgatggattgtatgtgatttgtgcaccgatacttaaattcttaagactagatggcatgaaagtatatgttccgacacctagcggcgtgctatgaggagcattgtgccgtgggagacttgacagtgagtattcgagagggaggatactccgtggtggttgaccagctccgggactcataattttccgagaacggcagcgaaacaggatgtaaagcatgaagtcggattggaatgagggtagaagagctgtttgagctacgtaatcactatttggaggggcaacccctccgatacatagagtacatatgtaaataccgagcaaatcttgaacaattcggatctctatcgataaaacgtgtcccccacaaaatcaacaaggcccaatagttcttttgatccatatccggggcacttcagaccacagttatgacgcaccagaatggaaacccgacggtattcagtagtgatctccaagtttatgaaaatgcgagatacagaaacacgcgctggagcgccccgaaacgtcatagaccgcgatctgcacgccttgtcctagaactctatcagtcgggccaaatgacttaagtggctgatgcaagggcatcattctagaaaatcatagttgagaaaatttgtatatcgatgtgctccatgtcttgaactggtgccgccatcaacactccttcaggcaaaaactccctagtctctattaggaatagacccggaatatcaatattccttatcaacaatcagcacaaaaatacattgctgaccaatcagtatctaccgctttggtctatttactttcctttccccaccgtcagcttagagtcaacttcccatcattcctgcaatgcccgttacagttgcgcaaattctcgcgccctacgagtataaaccagagcaagtggagcgggtagcctcccgcacggtacaacctcccattaccatagttgagcccaacccagaatggccgcaacggttcgaagaagtcaaagcgcggattcaaaaagcccttgggcccttggtctcggagattactcattccggctctaccagtgttcccggcttaccagcgaaagacattattgatgttgatgtgacactgaaagatgccatgaatgaactatcctatgtgaagcctctggaagaggcaggttttcggttcatcttgcgcgagccgctttggcaccaacaccggttctttgtggagaactggcccgaagcctaccacgtcaatgtccatgtgtggggtcccgactcgcccgaagctacgcgacatcgtatctttcgtgactggttgctcaaaacgccatcggatctagaactatatgccaaagtgaagcgcgaagcggctgaacaagcggctatagctggcgattcgatgatggattataccctacggaaagacgaaacgatccataagatcctaggacgagcattccgcgatttaggctatatttaatgaaacactcaagaggcgattaaattggtactgtcacgatctggaggatcggtggctcgctcctacccgttgcgctcctacccgttgaggaaggaaacgttccttcctattgcgcagggaagctaagcccgcgcattaggattttgcagggtttgtatgatttgtacttattgtttcgttgaaacttgagatacggagcccactgctccaacgattaacccatagacctttatccggtagatatgaaatagggctgtatatattgtagaagtggatttcagccggaactgcctgattaggcaagttgcattgctccccaggattcggccccgggttttatagagtatggagtagtggagaggtgacgcgcaacatgtggggattggtggcatggtgtatatcacggccaaggttttttccctttttctccgtttctcccctttttcccctccaaagttgatctcggagaaagcacccgacaaaacaatacaaggcaatctagggctaaaaaagagagaccccatgcgggagtctttataggaacaagagactgaaagagatctataggcgcaaagatatacactatagaatattttatttctccttcacgcttgctaatgcaagttcatattttccggtgtacggagtacagaccgcattggggaatagaaagacatatgagactctcgctcatatgaacactgcccaagtgaccctgtgcccgggctgctgatcagagaggaaggttaaacaaataacaagctattattggcacttagtggcgtacattggcattgaatttcctaagagtttccacttggctgaaatctgataggcggaaaagtgatcggcgggctctgatcgtgcacaagcccaaaacacccgctaactgagtctggagaagccgagagattgcttaatgaatttgtatttatgtactacctgggtgagacaggtattgattggatcgggtgggcactcagattccaaaagtcgtggaaatgtactccgtatcgggttggcctccaatgtccatgcaaattgttgtaaacctggaggtggtgggaacagccaatccacatggagcctgcttgctcgcatagttggattcaaggataatagtggaccccgagcagtagcttcaaatcaaattatgtgtttggtctggtgtacaaagtatattgaagcggagggcaagaaattatccaggccccctggtctagagaggtcaaggctcctagaagctttttaaaaccagccgaataccccgcgatgatcattctttttttccgtgttatatatattcctcattttatatcttctggcgtttcggtctatatattggcagattaaaagcatatagaggattatcattgaacgacgccactatgcagaccaggcggttcttgggcctcaacggcaccaagcttcagatcgccatcggcttcttggctggcatggacttcctgctgtttggttatgatcaaggcgtgactggtggtttgctgacactggactctttcgtcaaatatttccccgaaatcaacactctagattcatataccgagaactggagctcagcagcaaagagcaaccagtcaacccgacaaggtatcacggtcgcagcgtacaacctgggatgtttcgctggctcgattcctacaatctggatcggtaacattttgggtcgtcggaaggctatctttgtcggttcttttattatgtgtatcggtgccatccttcagtgcacatcctacggacttgctcagcttgttatcggtcgattggtcactgggttcggttagtatggcgaaacacatggagtagcaatccattaacatgaactgcaggcaacggaatcaacacctctacggtcccgacttggcagtcaggtaagcaaaatgaagacaatcccgcctcactgtattgttccgattcgcctcgccgctatatcttgattattgcgagcgatggattggcgagagtggcagtaaataatgaaaattatctaacatcgagtagaatgctgcaaatcccaccgacgaggtcagatggtcatgatcgagggtgccatgatcacatgcggtataaccatcagttactggatcgatttcggattgatgtttgcagacccaaacgaagtcgcttggagattcccgctggcgttccaaatcttcttcgccgcgattattctgggtttcgtcatgttcctccccgagtcaccccgttggcttattctaaagggtcgcgaggaagaagcaaaagagatcctggcatgcttgatgggtgacgaggctgatgagttgttcatcgacaccgaattcaccgctatcaaggctactgttctcgaaatggcaacgggatcattccgggacatgttcaccatgggcgaagaccgtcatttccaccgcactatgttggcatatgtcaaccaaatgttccagcaaatttccggcatcaacttgatcacctactatattcccactcttctggagcaacaggtcggactggatgccacgacttcacgtcttatctctgcatgtaatggaacggaatatttcatcgcgtcctggatagccgtgttcacagtcgaaaagtttggccgtcgaacactcatgctcttcggtgcggtgggaatgtcgatttcaatggcggtgcttgctatcgccgacagcatttcctcaagccacaaacagacctctataggtgtcaaggcaggtgtggcacagacagtatttctgtttgtgtttaataccttttttgccatcggttggcttgggatgacttggttgtatccagccgagattgtcccactgaagattcgtgccccagctaatgcattgtctacttcttcgaactggatttggaacttcatggttgtcatgattacccctgttgcttttgaaagcattggttacaagacctatgtcattttcgccgtgatgtaagtcctttttggtcccctatcactatattttgtactgaccagcttagcaatgctgccatcgtgcccgtcgtctatttcttcttccccgagactaccatgcgttcattggaagagatggaccgtatattccgcaaaactaccaacgtcttcaatgtggtctcgcttgctcgcactgagccccatatgtatggttcaaatggtgaactcttgcgtactttggatgatgtcgaggatgatgctgttcgtcgtgccagcttcctaaacaaggagagtaaggttcaccaccagagccacactcagcacgcagagcaatacagcgacgaacacaccagcgaggtgaaatgatctcggtctgttgttttgagatcatccgctctcttctccagacatctagtatgactttactgttctgagccatactgagttattcatttgtagccatctcgcgatctaccccaatacccctcgttagactgggcgtttttcattctttcatgatcctgaaatcacattgcacataatatttctccattctccagctccattgaaccttgtacggcttcacttggtgcgctctcgagttctgctttaagacacccagtgttatagattctatcgattcaaaagaaatagggtttgaacacaatcgttggccattctatgagatttaggtatatagctgatctctctatggtctatacatcaaacccaaaagacgaaaaaatacatcagaaacacacgtatatcgcgagaccaaaaggatttacagcttgctcttggctggctcattcttgagcaatgccgagttccatgggtaagggtcaaacaccaagtcgttaacagggttctcctcgcttgcgcggcggaacagatcctcgtacaccttgccgtcatagcgacccaggctgctgtccaggtgccagtcgggaatcgcccaagcatcgaccaatcggacagcgtgcgggcggatcgcgtcgagtagctttaatacggcagtagtacgagtcaaggtaatttgtcgcacagtaaccgcaccggaagagaagaactcggcggcttcacgctctagagtgtgcagcgagaagagtctgaataattgatgcaggaggcccttggtctctggatccaaggccgctgagagttcaggggaggaaaccgcctcgtagaagttcttcaccaccaggtactgagaatgagacgtagacaagcgccagaagtcaaccaaaaggctgttccaggagcgcttctcagcatcccgatgcttgagggcctcgaaggtcagatgagctgtgcgccaggcaaaggcagccacaatgtccttgtcttcatcgagcacatcgaatgaagctcccttgtcgcgacggtcgaggtatgtctgaagaatgcggctagtgtcgttatcagccggcttaccggccaggacggcacgggcagatttgagaagctattaatacggtcagttaggagtaaatagaatggaagaaagaactgcgacatacatattgtgcaacctgctgggtcaacatatagttatcaccttcccaagtcagtgtgggcagataatctgcgtaagccggtccaatgccgctgtagctgctgtatccgtgaccaccacaggcgcggcggcagacctccagaccctcaccggcagtggtactggcgagagccttaagaccacatgaggtggcgtgcagatccgccaggaggttcgcaccggcacggagttgctcgggtccagcgccccgcgactcctggtcgggcgaactggctgccttcatgcggctttgattctcctcatacagacgcatcataccgcgaccagtgaaatgaagagcatacatagatgccaaaagtggaagcaagcgcacctggaccatcttatagttcagtacttgggtctcacccgcgttcgggtccgaatcgcgatcctggaactgcctccgaaccgcacagtaacgggtcgcgatagtcacaccgcgagccagaacaccaccggcatctagaacaatgttggcgcgcacccaggtcatagtaccaaagacaagagatggcacagcaggcttagtatagcggttcgtctctttgtcgacctgacagaagcgggccagcatgttcacatggggtatcttgacgttgttgaacagcaggaaaccattatccatagtgctaagtagtcattagtgctgataccggccaaaaaatgagagccgacttacttgtagccaaatttggggccaatatcgcccacatatacattatccaatggttgatgggtttcgaggtcacggacctgcacgatgaatgggtgaggaccatagttcttgccatcaataaaaagctgggccataaccacagcgtgattggccgtgcgaccgagagatccaatccaccacttcgaagaagtcaatgttggagagttgatggtgaatgtcttatcgtcggagttccaggtggcggtggtttccaaaccgcgcacgttcgatccatggcccagctctgtttgcgcgtagcaaccgataatctcgtatttttctgcgcgttcaaggaacagcttgcgctgctcaggagttccttgctcgcgaagagtcacctagataacgaccaaagtggttagtttagttggagagttggattattgacaagggtctaattcacttactaggaacatactagcgtgcaaaccgtaaggggtaggttcaccaatcaagtcattagccgcatggagctcttccatcgaccatttgtgctcttcggcaagctgctggaggcgcttggccttgcccagcgatcgctggagccgctctacgcggcccaaagtatggttctgagacttatcaaatactttctcgggcttcaaaagagctaggatggacgctcgtcgctccaaagtttcctttgtgtgtagcaactcggataatctttcgacgttgacattcgattgagcacgctcttgctggaggagctcagatccttgcggacctgccggcttcagggctttaacccaatcaggaggaggtgacggcattgtgaaaaaaacgggatatattgggatagatgaaagagagaggatggggaaagatggggttatgaaccccagaaagaaggagaaaggttagaaggttagaagggccgaggatctcaatcgggaaagagcctcggcttaggagggctgaccaatcagggaagcgcagctcggaaatggccccggggaacttcatttcccgacctcgggagggtcgactccctaatttaccacttcccttatgtatggaggccacaaaattatacacaattactaactaccggtggttcattccgcaggattccccccgcataatggactcgttttgatatggggaagcggggagagaatacatacttttgacggctctcacggttcaactagtcccgagatcagcccgatcatcgggtattagaacggcttacgggttctgggaaatgacctaatgttttgcctcagctatgctcacgtgttaccaaaaatatccccggatcatgcggtcaatttatttgagcgaaggaaaaaaggaaaaaagaaaagagtcacgtggaacggggtacaacatatgatgttgtacgggatgagcgaaaagtccgaattatcggatctgataacaaaaagttcccgcgtcattctcacatgtcaaatgtaccaacatgtgagagtttttgtctattcattgcgcctgaccttggacacccgcggcaatcctagccacgtaatcagaatcgcaccggatagggcaatgataaatggctgcagcactttcactcccttggcttgtgcaagcacaccaacagcaaaagggagaatagcggccccgctacctccgaaggcagcgacaaatcctattgaggtaacatgcagatgccgaggaagaagcttcgtaatcattaccactgctccggggaaaaggggccccagaaagaagccttgcaaagacactgccacggccgatgcataaaattggggcacaagccatagaaccaaagcaaatcccatggagcaaactatgtaaacctggtgggaatcagtctcgttatatcgcaagacagcgcgatgctcaccgaaattgcgactttctcgccgacccggggcgtcacaaaccctaacattactcgcccaatcgtgatacccaaccagaacccagtagctgtcataccgctagcaaaagcgctaccttgccggactcgaatcataaaagtaacaatccaccctcccagcgcgacttctactccaacatatcccagcaagaacaatgcacagagccaagtcacccgagcagctgggcgcttgaagattgcatccctcaagccaccctttttgttctcgtccgctgatggtacattcaatgcacggtaatcggcagcagttgatttccagaagcatgcgccagaaaataccagttcgatggccgcacatccgatctaatcgattaaacagtggtcaaatagctgcgaggaagttcagcacttaccatgacataataaaagtaataccacggcagaccacccttggcaatcattgacgttgcgaccaacggccccagaactgccccggctccatagatcccatgtaacacccccaacacctcatttgcattggccatgttaccaatccatgcattccacgcagaatcctctaggccatttcccaaacctgcaaagacgaatgcgaccactattaccggataaggtggatgaacgcagttaataatataggcaatgagatgagacgctggtccgataatggccacaccgcgttgacctagcatatagtggatgcggtgattgagaaaagcggcggccgtatagcctactagaggtgacaagaaaatgagagacacaatcgtgtacgatagatggtagtatgattccagctgtatgctggatgagatagattctagttaattgtagggaattcaacttacgtatggaattagagcctgcgaacggttagtagatagctcaccaaattgagaccacactgtctccttttgggcaatatcaacttacaccatatgctgcgtcattcgcacccatcacgaggaatgaccagaaagttgcaaaggttcgatgaatattcacgcgaggctggttccatttctctaacaacggaaattcagggcccacgggtgaacctgtatttgactggccatgaggcaacgcctcgagagcgataaggctcgcatcgcgcggattttggatcatacagtcagttgccatagcgcgtaattcagtgctgtaagaatttttgggcaagcagaacaaaaaagcagccataaaagtccgcaaaaagccttggcgcggtggttcaacccgcattgccggattgagatgaggggatagtgaggcgtagtgtagttaccccacattgcttcggtagaacttcggatgaggatgctactgaacgggttatcagccaccatttccggttacgttccgacaatggttgcgcttgttatttgtatgcgttaagaggtcatgcactagcagatgatttctgatagatcaactccatcatcaacgacttattgtgaaaagctaagtgctgtactaagaacaccccaagattgaagctctcacatagcgtccgtggtcgcttgggaccccatcgagtacttcgtccatttcctcaataacttctatgcattaaatttgatatccttacgaagaataaaagcattggatcgttgaaacatccctcgaattctaccatcagcacttcaagacgctctcctctgcaatacgaactcgcgcagtatttggattctacgggggttgtttttccaccaatcagaatatgttcatttccttataacccaacccaatgctgcgatcaaatcaacatattctaacagcaatgagttacattaatcccataatcccgggatttaaccctgacccatccattattcgtgtcgataaagactttttcttggtcacctccacctttgaatacttccctggagttcccatttaccacagccaggacttgattcaatggacattgatcggtcatgcgttgacacggcccagtcagcttcaaattcatacgccagagccgggaggaggcgtatgggcaaccacaattcgttatcacggaggtgtttactatgtcatcgctgcgagctttcagcgttatcgtcctcaacaggatgaccgagtttggccacaagggttttatgttaagacgaccgatatatggaatgagaagacatggtctgatccagtctattttgatcaagttgggtttgaccaagatgtgagtttgaagcaatggtatcaccacatgcatacatcacgagaatgacaattgaatactacagcttttctgggatgacgatgaaaccgtatatttatcggccacctacagaaagcttcagccaagtgcaggtgctaagctgaaagactttgcgattcatatatgtactgttgatctggccaccgggcattctacatctgagcctaaattgatccgggaatcttgttctggtgttgccgagggatcacatattttcaagcgcggtcgttattggtatttgtttacagcagagggaggtactgaaagcggtcatagcgaatgggtgaaccgcagcgaggtcggtccattaggaccgtgggaactggggccaaataatcctctctggcgcaatggcgttgaggacgaagtgcaaaacaccgggcatgccgatctggtcgaggacaccaaagggcaatggtgggcagtccttctcggtgttcgtccttcaagacagggagatacgtgggaagagtcagtgctaggtatgacctctcaaagtatcagttagttatcatactaaccttcccaggccgagagacatttctagttcctttggaatggaaagacgattggcctgtgatcaatggaggacagaaaatcagtctcgactcctacggacctggtctgtacaaattccacaccccagtttcctggagagatgaattttcagatccgcaactgcaagttggatggtatcgaaaaagtgagatccgaagaacgaacccgcctgatcccatctgactataaaacagacacgccctttgtaaaagactactcacttactgagcggcccaatcaccttcgtcttcacggcggaccctataacctgtcagtgccggccagcccaactatgttccttcgcaagcaaacccaccagctctgcaggtgggaaacaaagctctcctttcagccgatgatagacgaaaccgaggctgggactgtggtgtggttaaactattttacctatagcagcatcggtatcaggaaggatagcaagggccgttttatccgttttcgaccatcagagggcgacgtcgtggaacatagattggatataaaaactgatgtcactctcacggttgactgtggcaccgagtatcgatttgggtactgcgaaagcacagaatctgacatccattggatcgggtcagtttctaatagtgctgctatggcagcacctccggttggggctaattttactggaatgatgctaggtctatatgcatttggagagcgccagagatgcctggccccagctgattttgcgtacgcagagttcagataagtcaaccctataggaaattgttgatgctttgtgttaaataatccttttgtttctcctccatcttctttcaataccgtaagctagtttatgcaattgtatttctccttagttagttaccttctttccccttacctaagaagaataggtagttcgtgagcggatccatcgggtctagaagatcagtcgacaccattccggaggatctccgacgaaatatagcagctttccaattctacccgttatttggctacgcgtaacttacttcggaggcatggtagtcggcttggtattagaagcatccggggcccgggcagtgtactaggctgcatgtgaatattacccttgagcttttcaacttcagatctgctattccacgctcacatctagaacttctcaacgtcgcgtgagagtttgcatttccttctgtcagggttgtcactgagattcgaggcatgtgtcttcaatttatatgggtttgcaaatcgcgcctactacctgcgatttgggttgtaaggttagatatatcctttcagtttggtttcttattctatgcgtactctctcagcatagtcaagaccgcccctaatcacggccaggtcgccaccccgagttaacataatatctctctttgccaaaccacaaacgacgtccctcttcccagagaaccaatcgtatgggacgaaaaactgctcgaagaccttgatcgtcaggggatctttgcgttgcgcgatctctaacccactctcgttgagatcaacagagcatacccaagaagaccgattaaggaatacgagtttccttgattcgtcaattccgatgacatgggcaacgcttagtccgaatgctgtcatccgtgaacgaagcggagcggccgaactcaatgttttgaccattttctccccctcttcatccgtgacaagtggatcgaacgccggtacagcatctaattgcttcccttgcaagaagctgctatctctgttttcgatgacaaggtggtttaaatcaattatcgtaattctgttggagtcgacggagctgttcggctgtaacaagtctagcataattctttgtttttggccgaccgaatagaggatcgcgcttttgagctctgccatgtcatttttcagcgataatgcaacgcatgaaaattcagaccagtcactccaggagtaggcgcagactttggtgttgtcgatacagacaatgtgtagagaggattctggatgggggagccatttgcggattccgggaatttgtggatatgttcgctctgtcacacacttaccgctgtccaagctgaacaggtgatcagactcacgagtcgatactaggaacttcgccgccatttcccctactagcacatctatgattgccttctcggagtcgaggcgggatttgaagagtaccgtcaaatcactaagccagcctttgtctgctgacttctgcattctgtgtaggaagatcatgttggaggcatcgacactaaggagcgcgtctctccgttcaatccagaccaacaggcggactggtgccttatggcagtatagagtcttcaagctcgttgctgttttctgttcgtacagtacgacagatccatcatcctttccgcaaaagataacttcagacgtgtgatggaccaccatggcagtgatcttcgctttggcttccacggaaaccgtctcgaccactgtagtgaaagtggtcccgctgctgtcatcgctcaaggtctcccgcaacagagtttcaggttcccacacattgcactgggcgcctcgtatatcggcaaaaagcatactgtccctggcaaaggcaagctgcttgatgaatgagttggatgacttgacccgatacaggagcttgaagatatcaaattcataaacgtggataatcccgtttgcaccacccgctgcgaggagacacccattgggacttggagcgagggtttggcaattggcacgaaaacattccagctgccgatcggcaaaggggtcaaggagggcaagatcaccatcgaggtacactactgcgagaagactaatgtcaggattggggttgaaagcaagcgcaacgacaacaacatccgtgcaggtttctccgctggatagtttcttgccacagttaccagcgtaggcgtcctcttccatgtcccacagcacaatgggttggcggctgtaagcgacggcaagcattccgtgggtggtagagagagccagtgcgcatggggtcccacgcggaggcgttcggttcgtctctagcgtatcggtatcgctccatggcctccgcaccgattccggctgggcgccgtgtcccaaatcccaagccgcgacataattgttgcgactcacaattaaaagcgtacttccatcgaattccatccccaccggactgggagggctcgcgatgctgtgcaccacttgcccacttctgatatcccagaccttggccattttcataccacaagttgctacgaggtcagttttgggtttgaaagcaatgaatttgactgcttcaccgtgctccaagaccttgtactcctggtacgatgtggcatgatacaatatgacagttcctgaactgagaccgacggccaggaactcgtctccatagcgcaaggccctaggttgaccttgacggaaatcgatgcacagcagcctgtcatcccattgcttgttaggtgtgccaggcacttcgagcctccggcctgagcgcccagtgttctataccatagactcggtgggacagaatggaggtaccaacgagtatattgctgacggtgatatcgtgagcgcgttggcaaacatggcaggaatccgagcaaggtccgttgtccactgtcgtagtgcttgtaaccgagggtccagtggtgaacgctcaatggcacatgcattgacgtagatcttgagatgatttgaggcgcggataaggtgattaagacttttcgagtcagcaatcgtttcaatccaagtgaggacattggatctgaagaactgcacggcaagctggaatgtccctgccgccaacgggtcagacctcgagagatgataggagtatgctgtgtatgcataggcggcgaaatctaatcttgctgctggcaaacgtgccgaaggacggcgtcggctgctcctcggaggcttcatttcttccccgacaaggtagttgagacacacccgagccatccgtgtgtgtgcttgagttttttcgacaaagaattcggactcaagtccgccggttacaaggaattgcctggcagtttcatccaccatattaactctcccatatttgtccacgaccaccagttcaccacaaagcgtggtgatactctcctccaaccttgggaatgagtcgtgggtgtctaaggtcagagcaccatctagttcactgattgtcattggtcgaattgcgcatactgtccacataagaataattttggccagctcttttcctcgagcagcctgcgacatataatccaaagtccgcttatatagtgactccatgcctctgggcacgtcttcaagaatctggtaaatttccctcctgctgtggcagcgtataagttcttcgagcactaaaattgtccacaagaaggaccccatagatttgtctagtatcttctcggctaatgtacctcgatcatcaggtccgacgacccctaaggccttggttctattcttaaccaaaagactgagatctgactctgtgtctattatcgagattggcaaggactggaccaggtcgggtgcaatgaacgagagaccttggtccagatcgaccgtatacgacttgtgatgagaattctcaggggtatagattcgtccatgttggaaataatggcatataaaaggaccggaggattgaaacactcgtctagggcgtcgatgacccagaaatgccgagtcattgtggcctggaaaatgccagaaaggaagaggattctccagagggtatgttcgtcgacacgatctaagcaaacaccatccgcctgtattcctagaatcgcatcactagcttcgctattagagctagccatctgaaaagccagagatcggagacaacaacctaggttggacttcgacttgtctccatgtttgaagaaaaagtagctgcatgtctggccagagtccttgagctgatcgatgacatagccagcgagaacagattttccagttgctggcttgctctttatccatagtgtcctgtcatttccggattccccatctctccatttgacgtgactggctttggtcgaaatccatccgcaggtcccatgcatccgagcttcgcagacatttgtaagatcattgtctaagatgtcgggaactttcaggtacttcttgagatttttgattctctcacgcctctgcttcagtttcagctccggaattgccgcggtaattttgttcacagtagaggcgagcgcgtttcggaggacggcatagttggggtctgcaggtgtgtcaaacttgcatatcgagcggtggtcagcagtcatgggtatctgctgctcttcacggtacccgaggacggccgactcgggatcgacgatgagtgagctaaacattttcatattctacgtttcgtagaacgaccagagctcaaggccggccgaaaaatgtcgaaatccgtcattgattacttggactgccccagaatttggttccagatcgccaacataagcacggtcgtatgcaaccttgaggaggttcttcagaatctttgccgaatcggcacctcgatgcggcgtggcgagaaaatagaatgcggcgaatcgcccagccagcgccttgtacacttcgtcttgtttagccaggatatatgctttctttatcactaagccacccttgctgtggccgatgacaacgatgtgtgttccagaattgagaatgcatggcgaagtgctgatcgcacctaggaatgacttgctaatgtggtgtatattcaagcagtcctcttttcctttcaagtagtacgaatcgtatccatagctatgaatgcggacgttcttgaatgcgggatctttggagagccactcccttggccagaaattataccgcagagacgatttggtccatgtttttctagaattaccgcctaggccatggacgaagatgaagtcgatctccggtgccgtcggggaatataggagactcagtccaagagggccttttacgctctccgcttgaccgtccgatgtgtttgacgtcctgggcagggcctttgacagagaaaacaggctcctcgagctcttagtcgagtcgcgactacttgagggactgtcgggatatagttcgggctttgcgtgccgctgctttcgaaagaactggtacagtcagcgatctggtaagagggaagtttcccaggaggccaaggaggtgagagtcaaccattgtagaccaaaaaatcccagtgcgtacggcgtcaatccggtcgctcggacttcaagaacggtctgccaatcaagagaataatagaataatggttcaatgggagttgtttcaggagagactcttggtaatgcccaacaccttggaattgaagcacgtaatatgtacctacccctccttcgaaccaccaatcagccagttgtcttaaccgctcgtcaacgacccccgccgactcgggaaagataacggtaggtatttacccagaaactcactccctttcacctctaactttgacatttcttgaggatgctgtgctgatttggcgcataaaagggattgttcacgcattgtatattatttcagagccatatactatgggttcaatgcatccaaccttcgcagttggggaccatgaggctttcatagaattcgctctcaggtacaaaaatcaccgccagctgcaaacaaattctgcgtcggagccatacttgtcgacggcgctaacggcaagatgctatcaacagggcactcgcttgaatacccgcgagattacaatgaagatctaggcaccacgcacgcagagcagtgttgtttcatcaagatcgccgatgaatacaaccttcccgaggaacgcatccacgaggtccttccggctaacacagtgctgtacacgaccatggagccatgcaacgaaagacttagcggcaatatgacctgcgcgaccaggatcttgaggcttaggagcgccatcaagacggtctacgttaaaatcaaagagccagggacatttattccgcacaatgatggacagcaaaggttggaggcaaacggggtcaaggtcgtgttccctgttgaacattggcatgataggatcatcaaggtctcaatgactggacattgaagactgagtttggagtagcgaagaaaggttgcggaaacacccggacggcccgagtcgccacgtggctctggacccttctttaccttctttgcttgtgtacagtgcttcgtcagtcttatttctgatttcttcgagattttataaatagatggtggcctagctggattgaatcaagtcatgctttaccccttcacgccgtcgctctcgcagacataggcagggggatactacaatgtagtcagcacagcgagatgcacatgtggatacacatacaagtggaactcgcaagcaagtggccaacacaactgagaatttcatacggagtacataaatgggagttgacccctcgggacgatagttatctggtgaagaggggaccctgtcacgggggacaggggcaccgacagccctgccagcgaaacaggtgtgagagcaaagtcgctcactgggaataataaggtaaaagagaggagagcaccaggggtggctactagaataatggaaagttgaaaggaggttgaaggtatctgcgtgcaataatttctacatcaggggtccttcatagttatcccgacctcgggaggttccgaggtcagcatagccgcttagtcatcctcgtcctctttcttctaaacagccttaactccgtgatccacatcgacaagcctaattggattctgccatcctcaactggcatgtggtggcagctcatcttcaaacctgttaagcaaagcgacaccctagtgcggatagccacaatgaccgaaagctcgactgttgaccaaatccccatctccgatgatgccgagcagaaggcggacaacgggtctgcattgagtgacccgatcgaacgtcgtcggcgacagaatcgcataaaccagagggctcaccgtacgtcactttcgctgcaatctattcaacagaggttaatctttgccgccaatatttgccaggagagcgcaagcgactgtcattaattaaaaacatccaccagaagagcctagtctcatcctcaagttcgacctctaacgtccaaacgcaagaccattcctcgcaagaccgttcttcgcaagacaatccgaaagtcaacttcaaccgcagctccgaatttctacacaacactctggagaaattcgccaagtcagcgtatgagagttacatacgcggggacccgagcactgatcatcttatgaccttgactaaggttaacgtctttcgaggattcatgcaaaatttgcgattaattggttggtcggagtactggatcgaccttgatgtcatttcgccgttcagtatagcttcgccacaaacgccccctcacatggacgataacagcctccttccgatcagcctgcagcccactcgaatccagaaatcgatacaccatcacccgtggttggacttatttcccttacctaagatgcgcgataatctcatcgaagccggggatgaatgggatgatgagcagctctgtcacgatatcatggggttctggggcgattcaacgatggatgcagggctgctagtttggggagacccttggaacgtgcagaactgggaggtgaccgagggatttctgaagaagtggcaatgggttattcgaggatgccccgaattgatgaacgcgacaaatagttggcgtgcccgtcgaggggagagactaatattccgctatgtttgaatcaacataatttaaactgggaaccagctttagcaatttactgagcagactaatattaaggggaggggttgttgcattattgtaaactaggggctatctatcagaaagttgtatcgaagagcaagtctataaaataagggacgtgaagccaaacaccaaaagtaacccatgagaacatcagacgtcaagatcatgaaaatagtagtcatgtcacacataaccccgggggctggggacctcatatcggagacctcgggtgagtttgtacttaggtaacatgttctttctcctcctctttaggaattcgcacccaaatcaacgtgatgaatgccgcaaccacttcacatgcaagcccaaaccaccagatggcacggattcctttcaagccgatgtcgccatctggtccctggtcgacttgggtgccgatggcatctgcgaccgctgtcatgattgcggaactcaagttctgcattgtcactagcagactcccagcactgccttgataagagcgacggacattgctggtgatataaattgacgctgctgcaaaagagagatccggaccgaaggtaacgagggccacaccagggaaggacagtgcccagtatgacgtgtttggggtttgtgggaggaagaaaacgggccccaagccaaatgcaaccatcgcagtgaaatagatatagtgacccgggaccacgtgaagagttcgactcaccacccaggtcgcgagcaccccgacaatagcattggggagaaggtagagtgcaaccgtgagaggagtattttgctggattcgtaaccagaactgaaccgcatagaactgccaagcaccctggaagccaccgtagccgatgaagtaggcaatcattaatggtgtaaagcctttcgtcttccagagcccattgggaatcagaggtcgctccacccagtgttcgatgaagaaaaacgcgataatcagaacaacgccgactgcaatcaaggcgtacgtgtagggcggccacattttcacagcgccttgagtcaacccgaacagcacacagatacagccgattgcaatgaagccagcgccaaggaaatcgaattggcgaatgcttggtacatcggctccgacaatgtcagcaactggaaggagagagggcatggtaaaccaggctgcaagaagacatagagcacagataatagcattggaaccgaagatccagtacagataagatttcagagcaccgccctgaatcccacctaaccaaaatccaaagggcgaggttgctgacattgcagaaaagactcgattcttccgaaggcctggcttgtatacgcgaccaaggatgctcatggacccagaaaccaatacccccacggagatcccctgcattgcacgtacaacatagaacagaatcgccgtcttggggtggattgagaagacacccacaatgttccaaatagttagccaaacgaaagccccgatcattaaggacctcggaggtgtcaagtcactcaatgagccggatatgaccacagagagactaagtggaagtgtgaaagaaccgagtagccagggaagctcgctgttgcgaattccaagagctcctttgaactcttcttgggtgactgtgatatcggcgaggaaaaacgaaaacagtagcaggccagccgaacaaacaagaacgaaaatcacctctgccgttaagctaccgagttcaggaggaacaccctgggactttgactcagatggagagccagcttcctcttgtagatcgggcaaccgagacgaacggcgcgttccgattcgttccatgcgggtagagggcacagtattgagttgatagtcgtcatccccatgtcggtcagtgatggaaagtgtccgcgatagattttccagagcttctcccatgtgcgagtcccttcgggttctcgtagtaggcactgtgtacaattcggggacatcttgagactcctcggggtgagaggagacggatctccgcctggtcgtctcatgagttgttgctggcgtgagactcgaactgaaagttcccaatttgtcttcttcaacgcgaaagcctttcttgacgctagcattatcggaatctagatgtgtcgatggcatattgtctcagacactcggattcgagcgtcttcatatatgactgtcgaggtatgggagacaaacaaaaggagcaatttgaaaaaagatcggaggggtatttttttctggtgaattgtcaatttgtgtgtggggacggggacgtccaacgtgattagcagcgaatttaaggtggtggaatgcggaaaccagaatccgtgagcagaagactattgatcgaaattttcaccaggctcaggtgatttgatatgtttggagggctggccctcgacaactcttaggcgagcgtggcctccaaaactttcgggcgattttgatgatcgggacgctttgggcgggcgcgaaggcacatattttgttggactggtctgatatcatcgagaacttgttgagaaacattcgaaatgcttcccaatatccatttttaaatggaacttgaagctgggggactgtgaaaacaatcgagtgacgtcttttgatctgataaattaagcatacagtattgccgcgtttagccgtttaccagattcatgtttttatatcatccccggctggcgtaagcgcggggataaactacattaggatacaaggataatgtttttttattcaacccctatgaatttgttgaatcgatatactcatattccaatgctcggtagctgcctggttctactgacatttaatcagtgctgttattgttgtgggtgatgacattcacattaaattagttgaggtgccgtgacaaaaatattttgcgcaagctcatgccttcaattacagtttctcctttcttccccatagctccaaccattctttaaccgaagcaccagatctaaccagctcattcatgcatatattgcgcacatagtcacatcgaattaccttcatggcgttacggacattgtggggtgagggagattccagggccttggccacccaatggccgtcatgtgcgtctaatgctagcacgataggatacgtcatctcgcggttgtgcaagtcttcggctgtagagcctttcagctttgcatactccgaagaataaacatttttacagtcattttggagctgcgaatgccagctatataaacgtcaaacctaaatcctagcatgtatctctaggaagggaccgacttacgcaaccgtagttaaagtttcatccatggaatcattctctaggacaaggtggcctagtaaacggaataatgaaccggtcttgagagaggccattcttcgatatgccgcaattctgtccgcagtggcagtagggaacgcacggattccatccctgcgccaaactagggatatatcttgaccttcaaggatatcctggagatcctgcatcagccatggggcgagattggggaagtccttcgttgttttgttgagaatctgggtgactctgtagtaggcgcggtttgctgtttcggatgggccgtatatattgtgagcagtgggtcgtcctttgcggtaatcgcttccgtcggagatctaagaaaatctctgtcagatggtttatcttaagccatatcaaagaaagtgggaagagggctttaggcactcacatcatcaaccagcattaggcagaggtgtatagcatccataatctccaacaccatccggtacttaggaggatcatcattatgaagggagggggatagcttgtgaacaaacgctatccaatgatgcttgccgtagacttcacgaagatattcataagggcattcaagtttagtaattctcttgggattctttcgtccgaccaggtgggcttttttgtcccaccaccgagggatgtgaatatgatcaacaattagatataggaagccgctcacaacaaccatacccaggacagggctgatccgaagaaaaaaattgaacaggctttcaaatagactcataatgtaaaatggatatgaatcgacttgcaataacgaagagagcaggatatgtgaaagaataatcaacgttcaaacatctatacttcgaagaattccttaaatgctagtcctcctgcccagaaaagtaacaagcaaaatgctagattcacaactgacgtcgcattctctgcacatactctggtgttatctcgtttacgcataccagatatatcttagtcgacggcgagtctatgagatttctgcaggtcaacttcaaacatagcgagtagaaacgaagaattactgtttccggggttccgaaatgttgcatatatacctgtggcaacttttccctgtctaaatatgcatgtaggagttgcattagggtgaaacggggtttattttcgcattttgcagggaatatgaacacctgcattatacaatatgattgtatatcccgattgcgataatgcaccgcaaacattgaaattgctttttgagtaatatacgttattcagatccttcaaatgtaggtcagatctacggtcattttcatcataatactgcctcatattctgccctactaagcacagaagaaatacatgtaattgagagcaggatgacaggggtttctttatcttacacggggagttaattaataaataatggcaacgctaaatgataccatggaccgagaatcccgtcatgcacacttatgacttacgcaggtggcatttgagggctgacattttctatcttattcatgtatatgtgttagttgcaattaaatttgaactcatgcataatcacccagttttgaataacagggctcggagaacgcgctcatcaaggaagctgtcacggtatctctacctatgctgaacctatatataggcgttgatttgaggggccttgattccgcactcagaattatttgattctttctttttgatctgcaaaattgccacaatggacggattcgacccctcccaagctccgatagagtaccaagctgtgaagcctctcgccgatttattcctcctcggagctgcacttgggtgggtgaccaattatgtcgggatggtctacacgtcgttcaatgaagagacctatgcaatgtcaattttggcactttgttgcaactttgcatgggagattgtctataccttgatttatccctccaaaaatcggcttgaacgaggagtattattcctagcgatgatcatcaactttggcattatgtatgccgcagtcatcttctcgccacgagaatggacccacgcgccactggtcgagcagaacctccattggatcttctccatcggaatcatcggattcctcactgggcacctcgctctcgctgcagaaatcggcgctgcgttggcgtacacctggggcgcggttgtggcccagctgctgctaagcgttggcggtatctgtcagcttctctgtcgtggaagtacccgtggtgcttcctacgctctatggtatgcagtcccacattttagatatgtctttcatataatattattgtctgaaagagtatcgataatcgattgaaaagcttacgctgacatattttaggttttcccgcttctttggatcgtgcagcgcgatggggttcgcagttctgcgttggatgtattggccggaatcatttgcatggcttagcagtccccttatactgtggagtgtggctgtcttcctaatcgttgatggcttttatgggctatgttactggtatgttaagcggtatgaaaagagttttggtacggcacgaacagaaaaggtcaaatgatctgtgaagaatgaggacagtatcatatcgatggctacattattggaagaaaatctgcagaagataagatattgaaacgaatgaattgcttttgtttgaatatctcacaatgtcacagtactatactgtggataatgctgcagtaagatatgtatcgttcaatatatgtagccctcttcaaaatgccatcaggtaaatttcaaagatatcctacccggcctcccatctacgtagacaggagagagtctcaagaatacgcacaggaaacccttcgtgttccatatctatccaagtcagtggtatttatttcgagtaagtaacaggagtctacctcagcaggtgccctctgtctaaataccagaatgagcaagtcagagttccaagtaatcattgtcggcggatcaatcggaggcttgactctggcacattgcctacaacgcgccgggattgaccatgttgtccttgagaaagcgggcaatccagcaccccaaattggggcatcgatcggcattttcccaaatggagctctcattcttgatcaactccaactgtatgagttggtcgagaaacacattgagcatctgagcatagcaaccatccgctatcccgacggttacagctttcaaagctcttttcccaaggtcctaagtgaaaggttagtcttagttcctcccattattcccgtggaagtatctttaaaagtatctttatggttctgatggcactgcacaggttcggttacccgatcgcattcctagatcgacagaagatgcttgaaatcctctaccacggctacccagatcatcagaaaatctgcctggacgaaagagtgacaaaaattgaaccttgtggtgatacggttatagtgagcacgggcaacggctctgtctatcgagggcaccttgtcgtcggcgcagatggcgtccacagcaaagttcggcaggaaatctggaacgcggttgagaaggctggctcgggagcggcaattgagagattcggtaagtaacaatgagctgtattattctctgatttatatgggaactgaacgctgcacaggtctcacggcggaatttcgctgcatcttcggcatctcctcccccatccaaggattgattataggagagcaggtgaatgcattatttgatggtttgaccatcattacgatccatggaaaaaatgggcgcgtgtattggttcgtcatacagaagttggatcagaaatatacttacccgaactgccctcgctacatgacaggcgacattgaaattgcagcagaggaactgagaagtatagtattctacaaagacctcgagtttgggcaactgtgggagaatcgtgagacagcctccatgaccgtcttggaggaacacatctttgaaacctggcatcatgaccggctagttcttctgggcgacagtgctcacaagataactcctaatatcggacagggcgccaatatggcaatagaggatgccgcagctctggcaaatctactgcaaagattacggaagggctcgggaagttggcctcccacagatggacaggtggaggctcttttgaatcaatatcgcaatattcgccatggccgcgtcaagtcagtctacaaaagctcccgctttttggtccgcctacatgctcgagatagcttacttaagactcttcttggtcgatactgtgtaccatatgccggcgacttgccggcgtatatcggatccaaatctattgccgacggggtgatgtgtgatttcctgcctcccccaaagcgtggtggaggcgggtgggagagatatcggactaaggacttgaattgggggtggattcaagctaccttgtatatcatcatctttactgttctgtatacatctatcaaccggtattggggtatggcggtcgagataaattgattttgatagggtatagcagaactacccgcaggcggtagagcacaataagccaataagatagcacgaaggcggtgtatgtaacgactatccttggaaccttagaactcagttcaaaaaaaatgaagctattcccaccatacaaatctccgcatacaccgaattctaggcgttgaagcaattgcgaccgtataagtgatttgtggggtggggatagctttaattcaatggtttatatagtcggggatagtttttagcgctagggattcgaagaaattgatgttttgtcgggtgggaataacttcaatttacagtacacgggagagcggtgtcgaaggcggtctaaaattcaggcatattcaggcaccaaccccgcaaaactaggcagaaaccacagtctcccacttaaagcacgtgaaatctccacccaaccggtggagataagatagactatcagtcatgtgatttgggtgggccaccagttgggtgaactgccccctgtcgcggtttgctgcgggccacaatcgttgcgccatcctcagctgaagatcgcatgatatgggcctacatcttccgcgtcataatccacggtttaacatgtttcatgccgggaaccgcgtatcaagtacatcgaggtggtatgcacaaatccctcaagtgcccgacaaagaatcagcttcttttctgtatagagaacatccatcgatcgcatatgccaggccagtttgctaggatcatggggcgatcggaccgtacggggatgcctagcgttgatggtgacacgggtcatgctccataaggatgtggatagacattatgaaattaactgcattatattgcttggacttgtcagactatctaaactgtgcggggaggtctgagatctatttggggcgcatattgacgaataatttcaggtgatatcgtcgaagtttcatggcattctacgtgttgtgcgcgtttacccgggcgaaaatatatcgatatggttccggtattagcaatcccaaggatgttggacctgatatgcatctaatatgcatgctcacatgcatgctcctccatattcattaggatgagatccacaattgatcgtacgtccgattcggtccgcttcgccggaactgattctcgtttgatgagtggttcctttaagattcctcgtctctgtacctcctcagtcgtgttataaatcatgaccaccattatgatttcccatcggagatccatgcggttctttctcgagtttgcatttatcgcatagggatgtctacatcttgcttcttggctgcacttggccccacgcctccagtcatgcacctgaattttgcatgaagcctccaagagagcagaagttctccgaccttccggggagcctgtactgacgtatgacgtaaaagagagtttgtgatatgaagggttgattttctcgcaaaaaaggcgaagggttgtttagaactttcttgaaagacattgaatggaaacatgctcggcctaacaacagcaaagatattcgcttttatttcctattttctttccccgataacattcttcaccaataataaagcggcttcgacatatcaccataggaggccggatctccgaagcttccaaatacgccacgcccagacaaatcatacacaacaaaagttccagtcaaatgatgaaagcgatagtggagctcgcgagatcaccgagccgtatgagaaggtatgatagggccttgcttctgaaaccgcattatctaacctccctaaacttcagattgtgtgcgctccattagaatacctgctctctattccagggaaagatatccggggcaaattgatatcagctttcaatgaatggctccatctgccggatgataaattggccattgtgaaagaagtgattgatcggctgcatacagcatcgctactgtgagttcaatcgggttgtactagaagccgcgctaaaacctatgcaggatagatgatattcaggacgcatctcatctccgtcggggacatcctgtggctcatgatgtctttggaatcgcccaaaccatcaatgcagccaactatgcatactttctacaacagaaaaggttgagtgagataaatgacccgcgcgcatttcctattttcactcaagcgctcttggatctgcacgtaggccaagggatggacctctactggcgtgacgcgctggtgtgccccacggaagcggaatacacccgtatggttatgtataaaaccggtggattgtttcgacttgcagtagaattgatgcaaattcaaagcactacaactacgtatgattagctcagtcgtacaatcccgaaactcttagctgacttgatctagggacctttcccgactcgtggagctattgggaatcatcttccagatccgggatgactatatgaatctgcagagcgggatttatgcaaagaaaaaaggattgatggaggacttaacagagggaaagttttcctatcctgtgattcatagcatccgtgcggttccaggcaacatgcaactcatcaatattctcaaacaacgcagtgaagacagagcagtcaaagtccgtgccgtgcagtacatggagtcaaccgggagttttcagtactgccgggaggtattgggagggttgatggagcaggcacgaagccatgttgacgagctggagatactcttggggcccaatcagggaattcgtcatattcttgatttacttgaggtctaaccaccagatgtgaatccaggtccatgagtccatgagtccatagttacatcctaaatgaacgcatggggtttttttcccaatcggcgatggtgaaccatggatattgctcatctattagcttacttgtatatccccatcatacagagctcgaagtccttttcgccgaactacctccagagctgcttgtacccacgcaatttcatgaccatgaccagcccgattccgtagactatcaagcacagtcccaagcgcgggactaacaggtaatgggccggctagcagcatgccatctttcagaaattattccacagattggcaaactcgatgtgccatagataagtagtctccacaaaggtcaatgggatttgatgtactcatcacttccgaagcagaaccttgatctaactcggtctcaagagccacccagctgaacttctcaaggtttgtgatcctttccaagtgctggtacatattggaaagactcgaccagagcatcgttcgcgttgcccataggagtatcagcgtagcagcgatctgggcgttttggaaacagagaacgactgggaacagattgctatcaggcgggatattacgggatatgcataatgtcaatactcgtacacggccatgatccgcacaacctatcaactacatattcacatagaaagcgacattggaatgaaagaaagtcgtattgctcatcttcgcaagcggagatatcgtttctttgtattttccccgcatttttgtgatcacgaaaccatttccggatctccacatgttaccaggaatcccttaccgagcattccgaaattccgagcatgtacgtactggtataagttggctgggagctgcaggtccccgggaaaaattaataaaaccctaacttcccttgtcatgtctcactctcatccacttagtattctctccatcgaggagaccaatttggcccgtgatgtggtcaaagctgctcacccaaacgtcgtgatcgactttcgggagatcttcctacaagaaccacccaaagctcagctccaggaatttctagctcttgaacatgccggccgcttaagcccaactaccccacggcctccacgtctcgctctatgccaatatgacgtgatcggggtggaccgcattcctcagttccacgaatctgtgatcgacgtggtttcacagtcacgagtgaaacacacggtggtggggagggaacatcatgccagtttgactctgtaagaaataattatagttgaacatccggagttttctaacagttgactaggagcgaatttgatgttctcgtcgataaatgcatgacatcaccattgttccagaaagcattgtcggaattcgatctccctgaagggttcgaggtcgtgattgagccatggccatatggtggcttggatcatacagatgaaaatcgtcgttttttccagggcctttgtttcgcccaggataaacgttctggcaatgaagactccaatttctattcgttccccttgcccattatccctgtgatggatgcccacacccaaaagatcacccgggtagatcgacccgccacaggcggcaatggtgatggtctacttgaacagactttcaagcgggatataattggtcattgcaagtcctccgaatacgtgccagagctgttgcccgaggggacccgcaaggatctcaaaccactgaatgtggtccagcctgagggtccgtccttccgagtcaccaacgagtctctggttgaatggcagaagtggcggtttcgtgttgcttttaatccgcgagagggtgcgaccattcacgatgtctcgtatgatggtcgtagcgtgatgcaccggctggcaatcagcgaaatggtaaattatatgctatcccaaacatatagctgggaactaattgtgcttcgcttgcttagaccgttccgtatgccgaccctcgaccccctttccatcggaaacaggcctttgactttggcgatggcggcggcggaaacatggctaacaacctctcactgggctgtgactgtctcggggtcattaaatatttcgacgccattgtcacccgggaagacggcaccgcccaaacccttccgaatgtgatttgtctccacgaacaggacaatggaattggatggaagcattccaactggcgtaccgggcgcgctgtcgtcacgcggaaccgggagcttgttgtccagtttattatcacactggccaactatgaatatatctttgcctataaattcgatcagtcgggtgggatcacagtcgaggcacgcgcaacaggtatattgaacgtggtcaatatcgacgctggtaaggtcagtgaatatggaaatgtggtgagcggtggtgttctcgctcagaaccaccagcacattttcaatatacgaatggatccagctatcgacggccccaacaactcagtggtcgtagaggaatctcactcagttccaatgaatgcggtgaccaaccccaatgggaacttctataaagtcaccaagcagaccatggagcgtgcatcttggatcgatgccgctccgcagctcaatcggaccatcaagatgatcaatccccacataacgaatcctatcagtggaaaccccgtgggatacaaattcattccactagccactcagactctattggccgatcctgcatcggtgcaggcgcgccgggctcaatttgctcaacaccacgtttgggtcacgaagtaccgcgacggggagctctatgctggaggtcgttatactttgcagagccaaacagaagtcgaaggtgtctctgatgctgtccttcgaggtgactctgttgttgacaccgacgtggtggtttggcactcctttggcattacccacaatcctcgtgtggaagattggcccgtgatgtatgttgatcgcatttttcttcttttcattctttcttcttcttttcattctaactcaataggcccgtcgagattttccagctcatgatccggcctgcggacttttttgtcgccaacccatcgctcgatgttccttccaacaagaatatatcgtcacgtctagctgactcggaatgctgtcgaaagtcgcatatttagctattatttaaaaagaaggacatagagatagagagagttttccctgattcgtgtatttctgcatcggcccgccccgcaatacccacctgtaaacaacatcgtcacagtgattgacctttgcccttgcattatttatgtaaccacaaccacaccaatcgtgccaagcgcccaaaacacaatggtgcgcaccagtcaacgataattttcactcaatgataaattcacgaaatcaggtaccttttatatggtatactaatacaaatagtacctaaagtccaagaatcttaatatcctttttctccaccaccctactaaggtaggggaataggtcttaacacgataattaagacagctttagtttatttgacatctatacggaatatcaggtatacaaaataataggattttcaaatttctgtataatatacatcgtccttctaaatatatttatcaaacttctataggtattaattatttggctttaatttagtgctagaacgacttgaccatgaactattatatattagtactcctatttgtctcttaataaattcaagggttgataaaaatggaaattatgatttttggactttggtaccatttgtattagcatactacgcaggtgtatagcggccaacagtcggatgcctgattttagcataccatacataccggcccgaattttacactgctgtagacatggttcgtcgctcagcaacccatgcccgtacttcccgaagattgcaaaaagttcttcacagtttgaaacggatttgattgaacctcaggtgggatagcgaagctggccgacaatcatctactcatcgaggtattcatcccccaaagacagattccaaggatgagaaagagacatctgagcttcatgcgcatgctgcgtctcaaagtaagttgtactcatcccacggtatttgggatccaacgccgatatcaaccacaacggagtctgctgctgcacgtacttccagccttcgtcaaatatctgaggctgctactcctcagctctcatctaacactttctggccaatgtcacctggtacagtggctggatctgaatctgaagtctgtgaagacctcagcagcttttttgaaatagccggtgaattctactttgaccctcaacctggatcgaatattgccgccggtgcagatgtgggattggcctccagatgacacgcgttcgcccaatgcgctgaacgcctttcatgccgaagatgaagcattgacgagagtcatggctggtttgctgtgaacattgtggaccttgttatgcataacggttcaataaattaagctatgagttcaacgatgagcgacttcggttcggttaaatacattgctatactcgaaattatgaaacatccctcgggtatttgcacttccgtttatccgtcacgaaatgactgttgtttcgaattgggattccccggaacttggcgtgcctttgcctatagttttcggcaattccaccagtcgctctaattcccacgactagttaatttccggaaggattttcttctttccgctttagactcttaccctcaggagcctagtatatttcccctctcttgtgtgttgtatccagactatcggatatgctagctgcagaagaagatctcacccgccggtgggggaaaacctcggatttccacgaatgatgcgtgccctcgccaaatactgtatacaaatatgtccaggcaagcccattaatgaagttttattgctcttcattcaacatacaaatcatctccctcgatgcattttggtaatatcatcaagccagtgcttttcgcggccctcgtgcacggatatgcaaaccctggcagttgttcaggggcgtgcaatgtgcacgacccgtcgttgatacaaagatcatcggacagtcgttatttccgattttccactggcaacaaaatttcttatgccagcgcctcatctatcaacggcccatggactacgattgggtccatcctgcctagtgggtcttctatcgatctcgccggaaatgatgacctatgggtaagcattaccctttccgcaaagcttgtccgcaagtgatcaacatattgggtactgacttccatgctaggctcccgatgcgcagcttgtgaatggtctttactatgtttattactctgtgtcgacgtttggttcacagaattcagcccttggactagccacatctgcaaccatggatttgggctcctggactgaccatggagcaactggtattgcttcgtcatctgccaaggcatataatgctattgatggcaatttgttcaatgctggtggtacttactatatgaatttcggctccttttggcacgatatctaccaggctccaatgaactcggatgccactaaagtcgcgtcttcgtcctacaatctggcttatgactcctctggaacacacgctgtggaggggtcctacatgtataagtatggaaactactactatctcttttactctgccggcatctgttgtggctacgacacatctcgccctgccagcggagcagaatacaagatcaaggtctgccgatcgacctcgcctactagcggatttgtatgttacccaatttcccgctttagacactcgccctaactcttttcctatccaaggttgatgcatcgggcactgcttgcacaagcgggggaggcacagttgttctagaaagccacgggacagtctatggtcctggtggacagtaagtttttgatttcgatcgtattccaaactcgaatattaacctgaccttgctccaggggcgtgtttaccgatcctagcctcggcccagtgctatactaccactatgttgacactactgtaggctatgccgatagtcagaaactctttgggtggaatcagatcgatttctcaagcggatggccagtggtttaagtgtgttggtgcctggtttttcaggccaggtactgttcttcccctttccttcctcttcctctctttgttctttctcctccagtcctctattagcttggaatacgatcgatgggttgactgggcttcttgctttctttcgtgggtaaagtagctttgcttggtttggtacatttgcaaccaaatgcgattgatgtaagtagtacagcattctaccactaaaccatagcgaacaacgggtatctgtttatcacatagggtgtatgctatcatggatttctcaatttgagataattcgttctaaaactgaagtttctaattcaaaaaaagcttacagtatgacacatcccggcgattttcgcactcggccgactggttctgccccaaggggttgccaacaaaatgagtctaaatttcctctcctcaagattattcgaagtattttttgaacttcataaatttcatttgctatggaaaagtcatctaaattaccctgcgccaaaacccaggtgaagtataacgcgggatggagacgcatcgtgcgaaatttcagtccgtcgtatggtctctcccccttcaaaaacgttaccggtttatgctgacagaaatatatagatggttcgcggtaactatgggcactggcattgtttcggtgttgatggtatcgatccctttcgatactccagtgctctattacttgtcgatcgtcttcttcctactcaatgcggtgttatttactctggctttcattacttccgtcctccgatacaccttatatcctgaaatatggcaggtgatgattcaagacccaaccaattcgctcttcttggggacaatcccgatgggcttcgctacactcattgagatgtgggtgttagtttgcgtgccaatctggggcgaatgggccaaaacatttgcatgggctttatggatgatcgacgtggtagcagcggcttctgtgacttcgtccctaaccttcattttgtaggtctacagtcctccacatgccaatttttaagatactgacatccgatcagaatgtctcagcgccatatcacctcgctagatcggttcactgcggtacaattattgccaatcgcagcgactattgtggcagcgggtaccggcgccgaggttgctcttatcttagcagacaagcaccatgcgatgggaacactcctcgcctcatttattctctggggtatgggcactccgatggccattgtggtattggtaatatactatcagcgactagcagtgcataagcttccaccgagggaactgattgtgagctgttttctaccactggggcctcttggctttggtgggttcgggtaagtgtcttgcagatttcccttgggcgccctaagactctgggctaatacgctgtcagcatcgtttacattgggaaggtagcacgggtattgtcgcaggattcccagttcctcgaccctatcgcaggccacattgcatatgtcttgggtgtcttcatatccctcctcatgtggagcttcggcttgatttggctcgtatttgccctagctaccgttctatacagctctccgtttcctttcaacatgggttggtggggatttacgttcccacttggggtgtattccgcaaacactatagagttgggccttgaaatggacatcatgttcttcaaagtcctcggtaccgtatgtccatcctgtttttttttcgttttccgctcttcaaataaatgataggtactaacttattatttgaagatcctcagtggcgcagtgttgctattatgggtgttggttgcatcgcgaactgtacacggagcatggcgcggaaccctattttatgctccatgcctacaaaacctggcaataaaggaagagggggctgagcgagatgaagatcggcgtcgggcgtaagacgaaaacattggtgaagtctctcattaccaagcctccaaacactccaccaatagaacaatgcgtatgcccaggtctgatccccagatgtaatgtatcgcgccggagaaccccgctgacggggtcttctgtacctgctgtcgtggccagtgaaggggaagcctagaagtactccgtatagcttaggcaatttttgccgaactcgatatctcgattcattggtcggacctagggtgattaccttgattacccccaaatgtttacggggtacgatgtattcatccatgccaagcactacctatcaggcgagtagtcacatgttcagcccgtcagcttcgtgttgttcgctttttccactctcttcttggattatggtcttttgtgataccggaggccgttttcttgactctttgctattcaaataagtctttcacggtagcgcttgagtattgagaatggtaaggcttgggttctatctatacagatctatggccaagcacaactctaagtgaagtctaggatacgggggagtatgagtttcccttcttgcaggaggtcttctctcctcgtgaatcgcacaagatcgagtatgaatactagggccctatattttatacggaaattatttctaagacctgttctttagttttgttttcgtccatggcctgaacccaagcggtcgcaatgaccatcctttccagacatggacgcatagcaatggcaagttttggccgagggacttcctggccgaggacataccatatgcgcgcgtctttgtttatggatacaattcaagcatcacccatccacagaccatgtctacggctagcatcaaggaccatgcgaatacgctgttgaatttattggacatggaacgcggccctcagatggtaaatcgtgggacccaacaagcttcatttgaataatcaattaacgtatcacagggatctgttccaccgaaagtgatatttatcggtcatagtttgggaggattagtgatcaaacaggtcagatatatatcccatgaccttttcctatggcatcttcctgacagtctatgaatcaacggtataggcactgctcaatgctaaagaagatccaaaatatacctctattcgttcggcaacttctggtcttgtcttcttcggtacacctcatcgtggcgcgaaagctgtggaactggggaaaattgcagcccgggttgctcgctttgtctccaaagggcatgccagcaatgaccttcttaactgcctggagttcaattccctttttacccgacagatgaccgatcgattccgacatcaactagaagattatcgtgttgttagctttatcgaagggaaggaggtgcagatagggggagttggaccagcatctatcagccatgtaagcagattttccttcactaattatgtgttcccccggtccccgtatacttttgtcctggaagagtgactgatattgaaaagcttgtggttgatgaagagtctgcagttcttgggttgtccgggttacgcgaaactcaactcaagctcgacgcagatcactcgcagatgtgcaaggtgagctctcggggtccgatgtatcgcttgataaaaggcaacatcaaacaactggtcgatcaggcgcttttgtcggagcaaggcttcattcccccatcgataccttcaagtaccgcgtcatccccaccgccagtcccaccacgccttcattcaaatagtagcacgccataccatgggcagggccgcccatctccttcgacacaaagggtgacaggaatgattttcaacgctctggataatgacccacggtctgttcgctccgcagaactcaagaatcgggctcgatgggacgaagcccgaaccgtcgaatatgagattttccaggagcacttgcgcagccttggtccggatcatttcagtacactatcagtggcatacaatctagctgaggtggaaatggagtccggctacctagataaagcaaatgaatggtgtcattgggtatccggaaatgcccaacgcgtctttgggacaaaacatcccctggcactgaagacggaaagtttgactgcagaggtcttgtgtcaacagggcaagtaccaagaggccgagtcggtctgcgccaacgtgttggcccgtcagcaaatgactatcggcgaagaccacctggacacctgtgacactcggcgccgactgggaatgacctacaatgggctaggtcgccgggaaaatgccgttatgactgcggaaaagctgacagacaccctaaagcgtctgcttggagaaacccacattcgtgtatttgtcattgcgttggatgctttggaatacatcgtgagcaaccattctgggaacgaaaataccttaattgtgatgcgttttcaacccgatgtacaacaagcagtgggtatatcgttacaggtctaccaagagcttcggaatgccttgggtcatggacacccggttaccattcgcgctctctgtctccacggccgagcacaaaactttatgcagcagagtatagaggcctcagagaccctgcgccgggctttggccagtgccgaagaaacattaggacccgatcatccgctgacattagaaatcgtgggcaacattggcattatgtacgctgcgcaaaatagctatgcccaaggttcactcaccaacagtcctgcggaagccttcccctggttgatacgatatttgaactgggttgaacagcgcaaaggcaaaaacaaccacgaagcgcaagccactttggagcttctggccagtctacatttcaacgctagagagtacgaacccgcccagaattactatgagcgcctcgtggcgaatattcgcggggccgactcagcaatgaccgagcgcgtcaacactcggcttcaactgtgccgggcgaacaccatgtacacccgtcggggcctgggatcgggactaggagggtttttgtccagcttgcagcgatactgacgtggttttatgattattatacctggatatacaacttcgctttatgaattcaatgggatctttgtcattattcagtcgtattcagtgtgatacatctaagtatgctcatgatccgtgaagggacatcatttgccttttgaattttatacacgatgagtggatcagccgatcatcataaggcgtttaatgtgtcaacttgttgggaatgctctttctgtatatgtaatcaatactgattccctccattatgatccgcatggaaatcatacctagccttatccaactgctcatggccggcattgctgagcttcttctcagggtcaaacttgtcagcgacgatcttcttctccgcagtgtgaatacctattcttgttaacttgaagtcttaaggcgcgagaatagacatcgaagctcacccttatcaatgtattcttggcccttgttgcctccgagcttgttagcgataccagagactttgtccattgtgaaagagtgatgattgtggtagaaaaattgtaacgggttactgtaaaagagtaaaaagcaactctagataatgaacgaccctttatagggatctatagagtcaattactatgtactacgcatttcgtattatgcttaactctgtctatgataatgattcgctttggcatagaacgctatcgtcattgccgcactcttaaatgtgaatttgcccccgcaggtctcagtatctagtcatctttattggcataccgcttccagataggctcagatctgaggtcatattgatgatctcgatcttgccatggtagatctagtccgttgtctaacggcgatattgcatatcgtgacgtcagcgagcaactatcagattatcaggcattagttgacaccctcattatgaggcattaaggcatacaggcaccaatagctatataccgaggagcccttgctttcacggcgcttctccgatctctcagttatacaaccggctatcaatattcttgttcaaccttgtgcggtattctttttacacccttcttgtatatttgttacaacgataagctcacacaaaaatgtcgcatagatggctctgcaatctatcaaccagactaacaacaatttcatcaaaagcatcatggagatattgaatattcggctgtgggcaacactcggtgcgagctaccccgaacctaattgcttccccgcgtttgatcaaagtcaaaacaaacccccatactatacagcagccaatgagacaacccaaacgtcagatgtcaggcaatttttccaagtgctattgacagagctccacttgatatgtctatttaatttcttaccccggaggttcttggtcaaaccctcggagatgtgccgatgcgccgaattagccaagtaggatgcgcgtgatccgatttctttataacctatggcctcctctaagaccccgggaggggagcgtttctcgtgttaaatatatacccggtcttacaagaaacaaagaaatgggaaatccggcagaggaatgggagaaacccgatagcaagggccttgccttcgaacaaaatgctctttaccatgcttatgcttccaagagtccagaatggcatcgagatatgaccaagcgtctacttcacaaggttgactggcaccttttacccttccttattctcatgtatttgttaaactttctggacagaaagtaggtgaccctgtttacagcagctatacatgatcacgaatcctaatagcttcttttagcaatttatcacaggctcgcctaggtacacttgaagaagacctcgacatggaaggcaccgattacaatcttgccacaagtatcttattcatcggctatctactgatgcaacttccatccaatctactcctaacccgtgttcggccttcgctgtttctgggtattgcaatggctatctggtatgacatatttcaatgagaccgacaagcgttagaatgcttaatttatttcacaggggtgtgatttccgcttgccaggcagcggttcagtcattttccggactcattgcgacgcggttcttcctcggatttgtcgaggcgccttttttcccaggtgccgtcatgttaatgtgagttactataaataaaaaagaagtgtgtctgaggaggttctgacatttactttgtataggtcgagctggtatacacgacaggaggtaattcaatacgccctgtaaaatgacgaagcataaaatctaacttactcgcttagttgagtcatcgtattgcatggttctatgctggcagctcgttagccaatgctttcggtggtcttatcggggcaggtgtgctaggtaatcttgatggcgcgcatggcatcgccggatggagatggctattcatcatcgagggatgtatcacagtgggaatatccctgctcgcagcgtgagtcttttctgtgcttgatacgtacattattatgtctccagactgactctcagtagtatctttcttccaaattatccagcttcgactccctggttagacgaacaagaacaagcatatgcgcagtggcgcctaatgcatgatgcaggagaagctgatgaggttagctcaactagtatcaaagacgccctaggtctggtatttgcggacaagcgtatctaccttttcatcttgcttcagcatgtctcgctcctgtcgcaaaacttccaatacttcttcccgactattgtgcagaccctcggatatgggaaagtcgaaacccttctgatcaccgcgcctgtatggattgctacgttctttgtctcgctgctggtgacatggtcatctggtaaaaccaacgatcgcagcctacatatcatctgcttgatgatggtcagcatggtaggaggtgtgattgccactgctaccactaaccttggcgccaaattcttcgccatgttcctgtaagtcctatggttccgttatttttcgcatgtctaacagtaatcaggatgcccatgggagctgtgtctgcatatcaaatcatcatcgcctgggttgccaattccttcccccggccgctggttaaacgctctgcggcaatcgctattgcaaatatgattggaaataccgcttctatctatggtagttacatgtggccatcatcttcgggacctcgatacattccaggaggaagcgcgaccgctgcgatagcactctttgtggcgttggtcgctctagtcattcgcctggtgcatattcgcatgaacaaaaggctggatgagactgagtcatcacgagatattatttcgtccaatacaaacgatctagaaacccgggctgttgggttccggtatattctatgatcccgtatttggggtttgttcttacacactctaaaaagacatggaagacatataatggattggcaatttcaactataaagcacacataagtatataaaagtagatatagggctccttttaacgtccgaagagcggggttggcatccttcgattagaaccgtccacattcgccatcacagtccaatcaaaagagaccttggattgtttcctcttcgttttccactccgaaatcactacacttcatcttcaacttcctcttctcatttcaaaatggtatgatctatatcccaccgtgtgatcctttgaattaggctgattttgcaagtcgggttcatcatctttcacttcaatccctattctggatttctctcaagcgctatccccatctaaacccgccttcctagcaagccttcgcgacgccctagtgaatgttggctttttctatcttcgaaatgctccgatttcggaccaaacccaagatcggtttatagaaaaggccctaggtctttttgaactaccactagagaaaaagcttgaaatcgaaatggtcaatagtccgcactttttgggctactcaaggcttggtgcagaaattacggctttgaaacctgattatcgtgaacaattcgatgtaagcttgggctgtattgtttcttcggatatctatgaacacttttgtcagttcgcaaccgaactccctgcacctggtccagacgagcctttatacaggaatgtcgttggtcctaaccaggtaagatcttatatttggtctttgtgtccgtcaatgctcataaagaattctgccagtggccggatgaaacggcaatccccggatttcgggaatctctcgacacatatctgtctgaagtgagcaacctagcggagttgttcccaggattgattgcagaggccttagaccttccatcaactgcattcgatcaggtctttgatactccccagcaacacaaactgaagttgatcaaataccctcccccacctgcaactagcaatgaggattccggatttcaaggtgttggtcctcacaaagattccggattcctcacattccttttgcagggtacacctcaccatggcctcgaggtccaaaataaggctgggacatggatccccgcgccgccactcccgggaacgttggttattaacattggccgctccctggaggcgctgactgggggtatctgcacggcaacgactcatcgggtaagcttacggcaggagaacttccaagacaatgggagtaatctagggtctaggttttccttcccggttttccagggagtgagtctcgatctttctgccgagaagatctctttggatattccagctcatatccgtgccttggtggaaaatgacaaggtcaaatcagatgcagaggcaacttttaacgaaatattccgtgggtgcattggcgagggaaccttcattgctcgggtgaccagtcaccaagatgttgggcagcgatggtatccggaagtcttgatgaaagcattgaagggtcagaaggatttccttagctgattgctgatataatatctatgatatgtctcgagatgattgcatttgcatatgcctacctaggtgactctacgtagtgtttttcctctgccgggtggggctttcctatcttggctagctacagtgacacagcaaaagtcttagcaccccaaattctgccggtcaaatacccaccaattaaaaatgaggcagaacgagcggtatcacaaaatcagaaggcggtctattcaattaagaaggcggtagcagaaggggtgttcagacttttgctgcgtcactgtacctcaagtatagtaattgatggttggagtcgttgacgacagatcaaggcaattattctggctttcatcaccacgcagattctcgctatcaaaaacattcctgtttctcacagtatactgttcaactgtagctttcactaaaactcatgcagaatcacatttcataattatcgtcgttgacgctcaccaccgaggcaggtaccttcccctaagattttgtcgtgagctgtgccctttccttgcccacttcattcttccaactccctcgttcaaagcccgcaaatcacttgttgcccacagccatgacatccctgtttactgatgtcgccgaaagtgctattgggctccgcagaatgtcccaaagcggcgcggttgtccctgctcgtccttccctgctgcagggtctccccgctggatacgctgtgcgggttttttcccaactcgagcgactccaagccgacgcggggaggatcctacagttgctccaagaaaataaagatggaaaccagtggctcgttgtcctcggtctgtcgacatcaacaatccgaaaattggacgacgaccacagtagtctgggaggcgtggaataccgcttccagtgggaaggatctacaggcgtcatcaaggtggtcccatctcatacccacgacatgaccacagatcaggtcaccaggtccatcgacgacagactttctgcaatgagaatccgttccactaataggaagtgggctgcaacttccacctacaaacccacccccaccaaaggcaagcagggcgatcaagcttttattccaccatctcggtgcccttccccccagcgacccgcgggctggcccacctttgttatcgagactggtgtgtccgagtccctccctcgactccgggaagacgcgaagtggtggctcgccgcttcgagtggggatgtgcggatcgtactcgttatcagtatcaagaggaccagcgtctactttgaaaaatggcaattggctccatcgaatgctccgcgccctctcacccgggcctacatcgataccctacgccttcaaggcccccacataccccctctcttccagcagccagcaacgatccagcaagcatactctgcacacgaagttgaggtaacccccactgggattgaggggactcctatgattctcccgtttgctgcgttgtatgaccgagaccccggacgtggggaagttgatgttgtcctcgatcctcaagactttcgggacatcaccagtatcctattttaacacctgttagttttgctacatggttggttaactgtttacctcgtctccaccttgctgtgatgacaaatttgtaccacacaggtgcgttcccaacatgctaggcccatatcattatccacactacagggcctagtatcaatcttccttctccaatatcgccttccagttgtcacgctccgagccgagcttaatcagctgggacccttctttagctagttaactaactatggtatcaccatgaaccttttcagagatcacctgatctggcttacttgctcaatttactcgcttactgtgtgcattgtttacattagatagattgtttgctgaattgctaagcaagatatttgaagtttgcactgtttgcaaagggatagctatatcaaatatttggttagtgtacagctaactaaactccaacaagggttgcgagtcggcaaacgcgcgcgaccatgacctgatgcttttcacttcaagctcaatacaaccaacactaaagcgagccgggaaatactgtaaagaatggttcttcattgctagggatgaaacttcaggcactgtacggtgatttaacgttgagtcaatcatagcggagatggttagaacaaaatacatggccctttcattgccgattgaatatctcccatgcaccacaaagcctcaattttagacgaacgtgaaaattcgacagccagccaaccaaaaatatcgctccatagtaatggatagttattctgtggcggagcgattgtttctgtctgacatttgcggcatcgattgctgtctgatattcaaggccgctatgaactgtcggtgttccgtattgtgtaatgtatgggtctaatcaatggtattcgactctctgtattgcactattctggcaatttatactaccatgattacataaggaatattacagcattggtaggattaataaatcttccgatataccggcgtatctacgccgagatgaacgcgcggcggctggataacttcttcgtgatagattagacctcgccacggcccacgtagcccatgcgcgggcaggtcaatggttcagcccgcccgtaagccgcccatcaaccgcccatcagcgcacaatgttcccaaataggatgtatgaatcgctcattctcgatatcacagctcccatataaccatggcggtctgagttggtcaaaacttgagagaagatgtattgaaatgacgggttataacgctagagccctaccacacggtgacttgtcatgtggttttttgttaacacctcagcttagctttcagatccgcgggcgaagagtccagaagaatctcgcgtaaggcgcccgcgtttcattgcgtttttcggggattcttcttctgaactaagctgttcagggggggtctgagctcgacgacgctttcgcgtacctggtgacaatggctcatcgacgccttggtctagtagctgtttctcatgttctgcttcggcagacgaaagaaagtcacagagctccctcgatgagatatggatatcttgatcgagattggggtatttctgtgagatgctcttaggggcaaagtccctgagtgaaagctggagcgctggttgtttagaatcatcgactggaagtccagactccgttcgaaaaggctgcaaatcgtcggttagtgctaaaatttcttgggactgcggctgaaaaggaacgtaccatcatatcgatcacagcctttgcttcgagttccttcaccccatccacggttattttgtgcggtcgccaaatggatatagtcgcctttttagaccctctatattcaatattgagggcaatcacagcgttcacgctcgtattagtgtcgaggatgtaatcatctgctaagtccgcagcagctcgaactttttgtgaatagcacacttctatgataacaccgggatatttggcatattcgtgtataaatgatgcatctgggcatcgttcggaataagtctgctctgtatcatttatatcattcggcagccggattctggatgtcgataaatgtttggtctttctcgcaaaatcaccgaaggcttcatcactcttttgcaactctgtcaatcgattcaaaattttagagactacctcggcacaaaacaaatcatgtagaggactcggcattcggatagtaagacgggaccgtctggggtcgtaatcgagcctataatacaactcaacaaacatgccttcaatgcgcctgaagatggacagtacttaccgtattttgtcttctacgtaacctcgaagagattcgtcaccatccagtacacgtaaaacctccgtatattggtccggagtgagccggtgttgccaccaagattgtggccgtcgacctttacggtggagtttgaaatagttcagcacgctttgtgcactagtcgacaacttcttctcttctgagggcgggggtgtagggggagtattcacaaaactcccagttggtgtggttttcttctccatgaggtctgattctgattcaggcgacatccttggggtacggtttgtttatgtcgcagagaaggggctaagcgccggatgagttgaggtgtcacgtgatgacgtggttgcagggatgtcgtgtacaacgtaaccgccttggagggcccctattaggtgtgtcccaccagtgcgatgaggtccacccaggcgtcgagcaggcctatcgagttggttctgggggagaagtgcaagtgtcaaggcgtaaacaacctcgtcagtgattttaggctcaatgttgagctgaatggtcagtgcggtggctggagcctgacactgttgttttcttttttctcgatctttctatcgacttcgacgtgccacgacactcattaattagcttcaaatgatgtttctcaattcccaaatggccagttcatatatcattgagccctcatgtttggatgctctttcgaaccccaaataatgatgttaagcaaaaaggcgacccatcgaggttacataatggtcaggtgatgctcagtgaagtggacgtgtttgatgattatgtaatgcccaggggcgtgctcagttctactcagtgagcaaaaagcggcaaggactgagcactaaaacggaaagggaaagccaagaagtggtagaggaaatctactactccgtacataggctgggattagatgacctccggagattggtgagaggaatggggatcgggatattgagcaagagtgagactctcagtggctgtaaatttaagaccttgagagaatatatattctgtcacaaatgagggaaatgtaaggagaaccttggaagttcattcaagatcgtgatcaaaggggccaatgcccaaatgtcttggcggatctccaattcccatttctctccacatctctcttcttctctccacacctcctcttatccaagatgccacgcgccgtccgaggtcagctccttttgttttctgcttttaagatctcttgctaacattttgtgtccttggtaggtctgctgatcgaatgcgatccctcgatcaagtcaatgatcctgaagtacgacgaagagcgacatgactacatagtggaggatttggatgacgagaaccacctggtcatcaaagagagccagttgcagaacctcaaggttcgcctagatcaggtacctactgcaccctagctattgccgggctatccgaggactgttactcatagactcgccaggaccttgacgaaaagatcatgcagctggatgaatccggatccgaataaggctgtaaccaggtatttctcaatgaagacgaggcctacacacgcgacgcagaggcaaccggtcaccatatccaagtccataacgcacccgccaaacaccatctcccaccgcttgttacgaaagatcgcatcatgacttcacccgtttacaatggttgaatgcagtccgaccgcccctctcaatcacccgccctttctccgaccgataaggcttggccactgtcaatgatagtgtgggggctgttttcaggcagcgcaagagaggtcggagattgtgcaactcatcgaggcttgtcatacttcacggtgctgtacatcccagctccgggccgtgctggctagtaatactcttgcaatgaatggaggcgtgtggcgtgatcgaatgttagcgaagcacatcatccaaaccatcggagaaacccttactccgacaggcataaccatggaccccgtatatagtgtagatgtcactatctagtgccacattctgctacacactcattggcacattggcacatacactgtaatcagtcaattacgtcttattgcataagacaacagtcgcgaccgtcgactgatgtcaacaccggttacacggcaatgctagagacagcgtctttgtgttccttttctgtgtaagggcacctggtttcgagtgcatcatggctatataagtcccttatgaacgcccgggacatccagcttccctctcatgagacataacccgcaaatatcagcttcaatataaaatcacgtctttcaagtcacccaacttccaactcacaacatgtctgttctccgtaccaacttccccggctctggcgacttcgcccccctcttccgtcttctggacgactacgatgaccaccgctctgcccgcaaccaggctgcagttcgctcgttctctcctcgcttcgacgtccgtgagagtgaaggggcatatcacttcgatggtgaactgcctggcatctctcaaaaggacatcgatattgagttctccgacccccagactctggttgtcaagggccgcactgaacgcgactacgaagacgtcgagccgccagaggaaaaggaaggctctaaggacgacgaaaccaagtccactcaccggttctgggctagcgagcgctcggtcggatcgttccagcgcgtcttcaccttcccgactcctgtcgaccagcacaatgtcaaggccagcctgaagaacggcattctttccatcaacgtgcccaagtccactgctgcttcttccaagaagatcaccattgagtgaacagtcacacccgtcacataaacgagccagaactatctttggcaatcgtattgcatgggaatcggacttaattggtctggggctattcaactcagaatgtattagtctatcttgattcaaattccatattgttctattttttttttggatattccttatgctccggggcctcggcacatgcaaatcctatgatacgcaaaatgcaatattaagataaaacagaattgaatcactttgatcacatcaactacttcaacaactacttcaactgcttcttcaaatacacgtttttgtctgatcaaaggtcgggttttctgactagatcaaagtagaagtagaattagaatcaagcctagcagaattaaattaatgccttatgttcaatggcaataaggtcttgactcgtgaagcagacgttactgtgacatcatcataacacttccattcaggaacagaataataataagactcaatgatcatactcctcaaagaccacagttttactaaaacagaaaatgtatgagtatcaaagcgagggtattgtgtcggaggaaggtgccaatccgttcctcgagcaccttccctttgatacgcccgtctacagttacgatcgacagtgcgctatagagagtctcttccctccatgttcaggttcagtcgaggatcgcttcgtcgttttgaaaaatttccctccagacgcattctcccagcacgaagaattaccgcggctttgcgattattcgccattatttcggatccttatcatcaaaatgccgggtggaccacatgaagacgcggccctccaatttaactacttgattatgacactcgccgagaatatgagcgtccgcagactggtcaggccgtggggatccaccagagtcgataccccggaccggcgaaaacaggcagacagcggatgggggccaagagggccaccgagacaattcccaaccgtagccctcgaagttggcttcaccgagaccacagcaaaattagagaacgatatcgcctggtggatcaacgggtcagatggtgatgtgacaatgggaatcactgtcgatatcaaaggttcgggctctattgaaatcaaaacctggaccccaggttctgagccgccatcccacccgaactacaccacagcaagcggtcgccatgtggtcgaccaaggtacttatgatccgcctccacctcgagtcgccgagagggtcctccttaagagggggcgtaatggcgctccttctacaacggaagggaacggtataaccataccattccgtgatttgctgttgtccgaaccaggacaaggcgagagcgatttcgtcctgacctcccaaatgttacttgaagaggtgggagaacccgtttgggatacaatggaccaggtcgagcggaccaaggcctcgaagagaagttaggatggttgtcacgttttgccgaggtcccccgctgtgtaatcacagccctttgatactccgtggctctctttctctccctcaaaccaaactccaaaaaaacattcatcgttctccctcgaaacatggctgaaaactactctttcaaatatttcaccgttaaatttcccaccgaccatcaatatgtggcccacgtggaaatcaaccgtccggaaaggttgaacgccttcatcgaagtgtaagcgctagttcccccagacttactgtacatatctttaacaaatcaaaatcagtatgtgggaaaacatggccaagatcttcaataaactttcctcagacccacacgtgcgcgcagtcgtcctcagcggcgctggagcgaaggcattcaccacagggctggacgtcaaggcagcctcggagggtctcctatcatcagacgacaccaagaccgacccagcccgaaaggcagtcgcgttccgtcgccacatcagcgccttccaagactgcatcacggcagtagagcgctgtgaaaagcccgtcgtggttgctctccacgggttctcattgggactcggcattgacctatccacggcgaccgacgtgcgtctctgcgctcgggatacccggttcggcgtcaaagaagtcgatatcgggcttgcggcagacatcggtactctcagccgtctgcccaaggtggtcgggaattacggatgggtcaaggaggtggcgctgacggcgcgcgagttcggcgctgaggaggcgctccgggtgggtttcgttaatgcggtgtatgatacccgtgaagctactattgtggctgcgttgaagctcgcatccctcatggctagcaagagccccgtggctgtgcagggtactaaggagatcttgaactactcgcgcgaccactctgtgcaggatggactacgctatacgagtgtgtggaatagcgctgctttgcagacgcaggatgtctcggcagctttgctgtctgggttgcaaaagcgtactccgacattcgagaagttgtagtgacaaattcacccatgcccactgtatataaggtcaaaacatctagtctgctaatattgaatgtcatcattttttacagaaactcaaaacccccgtgcgtttgccaaggaatgccaatatcatcacatttgacgtgacacatacggagttatcccgtacacatgaaactgtttcagggtaaatttccggcattttatccaaaagccttgttatttcaagtccgtgtctgagtttccatgaatcagaagcatcgatcaactggtcgatcaacgggtctccgcattccagccctccccttttctccgaagtaaaactcgagagcccactgaggatgtcactttttccacgtatccaagccattgctgaacatggcaaaatgtataatttcgaagaaactgccaattctatagagaaaattcagtctgactttccttttcactaaaaaattcgccctattcctctcgccatgaaatctgctattcttctctccgcggtcatccccagtgcgctaggtgcgaccatctacctcgctggtgactcaactatggcaaagggtgggactggatctggcacagcgggtacgtgttttccttgaagcttccggatagcatcatgctaatactcccaggttggggtgaatatgttacgccctatacctcactcaccgtgtccaatcaagctgtcgccggccgcagcgcacggtcatacacgcgtgaaggtcggttcgatgcaattgcagcagtggttcaatcaggagattgggtgatcatcgagttcggccacaacgacggtggctctttgactcccaccgacaacgggcgcaccgattgttctggcacaggaagcgagacttgtagcacaacctacgacggggtcgccgagacagtgttgacgttcccggcatatgtcgagaatgccaccaaggtgttcaaggccaagggtgcgaatgtgatcatctcgagccaaacacccaacaacccctgggaaactggaaccttcacctatgccccctcgcggtttgtgggctatgcgcaggtggcagctgcagccgccggagtgccctatgttgaccacggggcctatgtggccgaccagttccagacgctgggcctgactgctgtcgatgcctacttccccttggaccacacgcacaccagtcctaccggtgcatcggtagtggcccaggcctttttcaaggctgtggtttgtggtgatgttgcgctgaagagttccctgaccaccacatctttccctggttcgtgtctctaaacgaacagcagagtagcaagtacggacccgtgcaatctgagcttattttgtgactatgattgcgctgcctgtagagagagataacagaagattgcgtggcttcggctggacaactatatccaagagaaattgtagattgggttccagcccaatctggctcatgagcaggtaaatccgtaaggtttcgcaacaaggcaggaacactgagatgtaaagctctcgttgggaatcccagtaggttcaatttcattcctccagaatagaccgaacgatgccccggttttcgactcggtgataatattgattcacgttcacaaaacgagcatcaaatgcaccctgggtctgtacaatctcgcgcagaactggccatagagagcaatcgtcgatggtaaacacggagcctcctaggtaatgttttccctgcagagtacactcccaatcctcaatcccgtattcaaacccactggctggattggtggcacagtgccgacgccagcgtgccagaaactggtcgatcgttggcaataaactgcccccgcgtaacgaatccacgcctggccgtaaggtctcagtggatcggttagccatgtgcgctaggaaaacggagtcgcccgcgattatttctccatcacccgtttcatatattggcagtgtcgttggatcactatctctagctcccagttgctcatggttggtgatcaattgataccggacgccgttttcccccagacagagacgaacacgcaaattggccacaagatcacagccaagtaatagttggcctgttgctgtagtcacaaagttgaccacgtcaaagccttcaccgtagacggcatcccaatcgaattcggtggcacgattttcctggccaaaagcaccaatgagacgtgcagttgcagcaggatccccgtggaccacagcgcgagtgtgatccaatttcttactgacagccccttgtccccagattgtgttggccacagggtcgatgaaagtgccaatatgacggaaagtaagggaaatgcgctggccgccgtaggcttgctcctcggcagatttagttggattgggccgtttgtcggcccggattccatgaagccatcgcatgtttgtctttgggccgagaacgaaaagtgacccgtgaggaagaggcacgcgctgcgttgtccgacatggttcaatttctccatcaggctcagatgccgaggtcttggtacggagaaccatcacgcgctcggcgcctagactgacgttgcagatgaaagaccctcgcacaatatccagcgtcttatctgagtgctctgatatacgatcctgtccatcacggtaaagctgaataagcacatgattcaaggggtggcctagtattcgctcgacagctatgcggacttcatcaaccgcggaggtaaatggcttgaagggtggagactcgtctgccggatgacggtatatgggtatggctccatcgggtcgaggttgaccctggactgcgaccaatcggggaacctgacccgacagatggtacatcttctgccaatctacctcggcatgtatacgctcaaaggagtctgcggccaagttaagattgttcacgaggcgcgagtcgccctccccgatgttattttgggatgtggttggtatttccgcggattttgaaggtgttatcgtcccatcggggtcagcccgaggtctggctgaaggttcttttggaccttcccggcgcttcggacgacgggcacgcacgcggaccttcttttggtcttctactggaccccgcgcctgcgcaggagtagcgcgctgtgcgcgagaagaacgagcaggttcggggccatctgtgggagaggtgtccgcagtattccagaattccagaccatccatgacgctctcgaggccagccgtagcggctgacctcttagactgcggtgcgccttggcgggcaattgtctcagtctcatcccaatctagctcctgaatgagctcccgagcggtgataccagtcgctcccaagatatctgccatacgtcgcattgcttcttgatgccgctgaaaatcgcggaaacccaagcaatcctccacaagagttactgaaaacccgttgcggacagcatccaaagcggtcgcaaacacagagacattggacaacgagccacaaagatacaactcggtcacaaagtgtgtcctgaaggatagcacaaggccgggggactccagggcggagtaacctgttttgtcgactacaatgtcatgctgggcgttgatggcggccagaatcggtgcggggaactgatatcccggggtatgcggatcacagcatagcgaagagtcggcggagagaaaagcttcctggtcaacaggttctggcgaatcatggtccgacgcaacttcaattatatccgaggtgggcatctcctttctgcggggtggctctctgtctagcacaatgcgatcaccaaagttccagtcgacgatagtctgaggggattcatatcgtgagcgcacccaaactacatcgccgactcgacggaatgcagatgccagctgtggaagggtctcgaggatatctggtgtattggggacatgtaaagccccggacggacggacaaagtcattttgaaagtcaagtagtaacaaggcctttcgggtctggatggtgggcagatccccgaatgagaagacactcatcgtatagacatggtacgcccaggactaattggacagaccaaacaataccagtggatatgaggatatgcagagagaggggaggggcggagagcctggaggcctgaggcagaaatggtactttggaaggaacgatcgtcgaaaaagtcgaggcaggtacgaatcacgtgtacgaatataaaaaacatagaaagtctggaccctcacggcctcacgttgatattctgctatttccggagatcacgcctactccgggggagatatcggccagcccatgagacgaaccgtaaaacaatctaagacaatgagcctatctacggagtaccgagtatgcgctggtcgcactgggaaacgcaattcatgacataataaattcctatcctccaatcaggacacccgccggtgtcggtgtggatctccggggagcaaggtctgctctccggtaattttctacggtgactcgaatcgcccagcatatttgcccattatttaaattcccaagcttccccatccaacttcttcttttccacactctcctctcctccatatcttcacaatggcttctcgtggtcttccccgtgccctccgcctcgcccgcgtggccgctcctcgctcggtcatcaccgcagccctccctcgccctgtcatcgctgccgctgccgctattccccgtgtctcctcggccgtcacctccgtccgtggtatcaagaccattgacttcgccggtgtcaaggaggacgtctacgagcgtgctgattggccccaggagaagctccaggagtacttcaagaacgacacccttgccctcatcggttacggctcccagggtcacggccaaggtctgaacctccgtgaccagggtctcaacgttatcgtcggtgtccgcaaggatggtgcctcatggaaggaggccatccaggacggctgggtccccggcaagaacctgttcgatatgaccaccgccattgagaagggtaccattatcatgaacctgctctccgatgccgcccagtccgagacctggcccactatcaagcccctcctcaccaagggcaagactctctacttctcccacggtttctcccccgtcttcaaggacctcactaaggtcgaggttcccaaggacatcgatgtcatcctcgttgcccccaagggttccggccgtaccgttcgcactctcttccgtgagggccgtggtatcaactcctccatcgccgtcttccaggacgtcaccggccacgccaaggagcgcgccatcgccatgggtgttgccgtcggttccggctacctctatgagaccacctttgaaaaggaggtctactctgacctctacggagagcgtggctgccttatgggcggtatccacggtatgttcctcgcccagtacgaggttctccgtgagcgtggccacagcccctccgaggccttcaacgagaccgttgaggaggccacccagtccctgtaccccctcatcggtggtaacggtatggactggatgtacgctgcctgctccaccaccgcccgtcgcggtgccattgactggtccagccgcttcaaggacaccctgaagcccgtcttcaacgacctctacgacagcgtccacaacggcactgagacccagcgctcgctcgactacaactcgcagcccgactaccgcgagaagtacgagaaggagatgcaggagatccgcgatctcgaaatctggcgcgccggcaaggccgtccgctctctccgccccgagaaccagaaataaataataccttgatacccgtgggggtgcaaaaaatgatgatgtactatgaactgtgttttttgggtttcaggtcgaaaatattattttgaggctttaccggccattccccagttactttcttttccattccgtagcttctagattgtttctggcggctcacacctgcagctgtagatcaatagacgccgaagcccggagaagaatccggggtaagataagagtcattctacgtctcgtctgtttctcctcctaaacctcttcttcagcctcttctccagcccacaatgacacctgatgttgcagttcaatcgcttactccggccgcagttgaagcggcgtataggctcatccagccttacgtgcaccggacgccactgctgacatgtaaaacactcgacacaatcgcctcaacaccgcaatcccccgaagccttggtcggaacgccatttgaaggccaaactcccgctcacccacaaattcgattctttttcaagtgcgagaaccttcagcgaattggtgcctttaaagcacgtggtgcattccacgcattgctgcgactattggaggagcgcggggaggaagtcaaacggcgcggggtggttacacatagctctggtattttccgatcttctaccacacaaatcagaattatacatgctgaatcttctgtctttcagggaaccatgcacaagccctcgccctcgctgcctcgaccctgggtattcccgcctatattgtgatgccccgcatcagcacgccatcgaagattgcgggtacgcagtcccacggcgcggaggtaattttcagcggctcgacaagtgtagaacgggaagctgtggtggcagagatacaggcgaagacaaacgccattctcgtgccaccatacgatgatttcaatgtcatttgtgggcagggtacaacggctttggagctggaggcacagcatgccgaacaagctgggtcccgacccctagatgccgttatcactcctattggtggaggtggactcaactccggcgtggcgacgtggttctcggataagaagacacgcgtgttcggcgcagagcccagctttgaaggcgcagatgattgtcggcgcggactgcaggttggactgcgtgtggaagccgttcgcaccctcactatcgcagatgggctacgcactccagtgggattactcaattgggaggtcatctctaatccgaagaaggtggaaggggtgttcgctgtcactgaagagcagatcaagtcggccatgcggttggttatagagcgcatgaaacttgttgttgagccgagtgcagtggttggactggccgtgtgtctgtttgatgaaaacttcaggcgacgagtcgagcaagagggtggcaaggagggatgggatgttggcattgtgttcagcggcggcaacacaaccgtcgaggcaattgccaagctgtttacatgaatctacgaaatttgagcctacgaaattgaatataaagcattggcagagatgaatatacaccgtgaatagaaccgttcaatcaatgatgaggatcagtcatctcaaccccagagtcacgaatgtaaaatgaaaagctcccaccattgttcgcctctattgcttccacgatgcgacgaggccattcattgcgtccccatgaattgacccatgccgatatcttcccttgctgaaccacgctctgccgtgaaggggcgtctttcacggctgcatgagcggccatgccgggtgggaatggacgaacggaagaccggtggacaatcagacgcagtgttgaaaaagtgccccagggtgcagggagagcaggtctcagcggtggagtacaaacctggggctggtcgtagtaaccagtgccagaggctcgaccccctgataccgttgtagtatacacaactgcacactgaaactgactctgcacacccctcagctccctcaccagctcggtatagaggtcagacaaatggaaactcttcttttgctcgcgctcggcgtcaatttctgcctgaggacgcccgatttcttctgtccgagcgacctcgtcacgcagccggtcttgtttgatgaaagcggtggcactgtcgatggcgatcatttgcaagggacgtgatgcggaacgatgtcgtgagagatcgaaaaggtacgattctagcgtccggattgtcgccaaaagagcagatgaagattgcgggcgaaatacatggacatgctgcagtgaagaaacgagcaatgattcaagatgatgatctggcattcctcctgattgagccccgggacctgactcagatattccacgctgcttcagtacgatatctcgagccacagtccttagtctttcggcatcgaatcggtggtcggtatctataaacaccacggctgcctctttgccactgactgagatgtctccatatcttcgtggtaagatagcgagagccgtgagatagtacaatagctgcgacttccccgaagccgacaggctgcttgaaatctccaagacaggaacctgctgtttcttgctaccggctgggtcagagggcaacacattggcaagtggctcaatgtcttgcgctgcgtgtatttcatccggcctagaaccctgaccagccgggaattcactgtgccgcagcatttcctcatcttcaagaatctgctgttctacatgctcacttgaaggttgaagctgtccatcgttcatagcacctgacacaggaagtgctttcggcgcaaagacttcaagcaaagtgtccagaatgggcacgcccaatgaatgcgggtcatggcttgagtgactaggaaacacacgggccaatacagagagtatctagaactagtcaactcaatgcattcaacgaaataggcaagctgcaatacctcgtccaatccctcttcatgtacatcggctagcgatctctccccgagattggctgccatgggtaagcactggactgcgtcatggatcttgcatcacttgatcttgaccaaggcgtttaaagcgcagtgaatagatgcgaccacagtagtagaagtgtagaagtgaagtgtacaacatacgagtggtgatgcgtgcggaatcgaatagcgcggctgacggagcttcggaacttcccaacttccaaacttttcccttgacaacaccaaacctccataatctcactctagttggattatctcatattcataatcgcaaatcacaatggctcctctcgtccccgtattctccgccgaatccctccccgatcatgtcaataccattcgccgcaacttcatagacaaacgccgcaaaggcgaaccagtcaacctcaaggagtgcccattacttgaaatgacacaattctcttgcaatccaccacaaaatggagttcccgaaccaggggttgtggtgtgtgagcctgtggtgcgattgttccgacggtgagtcttaagctccgcgttcaagtcaaatggcaagctgatcttgtagctgtgccggtgggttaatggttgaaacaacatcatgggagccaattaggattgcagaggaagcgaagcaagcagcaagtacaaaaaaatgagacggactactttgcattacgaatgcgcattgggcggagttggctatatgggattacgactatttgcaagtttcaagaataaaagttgcattcgaataatgcttgtgactgccatggggtatctcctcaggtcatgctcctgaataaaacacaagcgccagcccataatcgggggagaaaagaaaagaaaagaacgccggtaagccttatgcctttgtaatttacaggtcaatcatgagatccgccggctcgacacttgctagaggctttggagtcttatcctctcttcgctgtgtattcgagcttgtctggcgccagagatctcgctcacagttgacaatggggcccagctctgagatgttgagccggggcttggtgtcggcatccgccgggtgtcccgaggcaatatccatagttgagctggtgattgtgccgtgggagtccttgctgtgctttttggatagtcccttgatcgtcttttcgaacatgctttccatgctgtccattctccgaccccagagtttcttatcgcggccagtcgaacccgtctggttgtcgcggaatgccgcgcccgctaatttgcgcaaagcttcctcgccatgccgtccatcctctgcagcgcgttccctaattttgcgcgggtcgttgtctcgtccgatgaaaactgcggtggcagagtaggtgtgtttgctagggaagctcgggaagtgtttggggatatagggacgacttgcgcggtcgtcttcactgcttagagacgtgaggaatgggagagatttggatatttcattctctggtgggggagatggtagtaatgtcggcttgggttggtctaagggcgttttgagatgagggagaagatcatcgggattgaggcggatacgcttcagagcgtggtcgaaatcgtgcggaattggttggatacgtcgcgcagatagcatggactgacggatgaatgtagagagtcggagcatatctggagatttcaggcgcaaaccgtcaattcaagctccaaaatgaatacgataccaggtcacgtacactcttcagtagcactacagagacttgacagcgcagctggatcggctaactcaaaccccgaatccttcaaagtctggccgactgcccgattcattaattggtccagttgggtgtcatcttgcacgactggctcggacatggatgggagaatcacgggctcttgtaaacgatggtggtgatggcaatgacgctttatccgcttcgcatggttctcatcgaatgatgaagcaggtcttttaatatgggcgcccgatgtcgccatggcgattgtgttggtctaattcaagaagtggtcgtccagactaggcaatgttatcgagttgggtcacggtcacgtgctaaggcggtaagtagatcgatgtcatagaccttcgggggaggaggaagcaatgtgaatgaatggcttagtttgggcttgagtagataaattgcttgggtaggacattcattatatgacggcaaataattcgaccaacaaggcttcgttcgtcctacatatcctccatctcgaaggcttcctcgtggtcttgcttttggtattgacataggtagtgctaaatggcaaaaagctattccattgatgcaagtgattcattatatataaatctacaagaaaatagatctttgatcgttatttcgcagccgcggaatggtaagggagtagtgaacatgccataaattgtagttggctctcatagttagaccgaccaatccggcggctcgcttagtccgctccgaagcttcaacttcacttcacaaatcagccttcttccctacccccctctcctctccccaccaacgtccgaggcaggatttaagctgtccacaacccatattgcttttgctcaagcatcgattgacgcaacttattcgtcgcaatgcccgccgccattccccccattaccggcgtacgtgccccttccgttgaaggccgggttaacccgctcgggttaccaggtcaattgaggtgttcggaatgatttactgacattctatgcctctcacagatgctccggcgtggtcttgtcctggacctgagcaccgctttcggtaagtcgtgattccggatcgagtggcatgattcaagccgacaagttgaacctcgcgatctcgcgggagcaaccacatgaaatacaaacaccatgaagacggctgggatgagatcaacaagtgaaatagttgctgactagggttatctcatccactaggcttcggtactaccttcggctacctctggtggtacggtaagtagatttatccccggctgcgccaccacgcgatcgataattcgaaatctgacatgtgtttgtcctacaggataccaccttccccgcgtgcgtgagcgtgatacctactacgcccgcctcgaggttgagcgtgctgcccagcggggttaaatcgatcaaccctgatcacctctcgatcgtctccctcccgcccgttcggcgccagttcttttctttgtcaaagcgttatctagaaatcgcccagtggtgggggcatatgcctccacgtcaccatcgggtctggttggatcgacgggtgtgtacgagtgggtggttagatttgagattgattgtacatatacgcctgtggacaaccgaccgttttgatttttggacttgactcttgaaatagattaccgattggccatggccatcgcagaccattctacgtagtagcgcccgaacgcacagagcgatatacttgacccctacgcctgaccaaccaaaatgagcgaattggatctattgtgttcaaacgctaattacgccggatatatgtacgtggaaacaccagcgcacccttcgcgggattgccgaaccatgtctccgccatgtgtaaagccataaccatcatcccgtatctggtcatccccgtggggtatgggcgagtgtctcgtatggaaccgatggaaaaacggcaagtatgaagccctaacaggcgttcaccgtagcactcgatcaaatgatatgcctcggacggtcccgccggccatggaggtgcgcacgtttttcttgaagttctcacgagtggcgcgaagatcttccgcggcgtccttattgagagggtcggaggcgtttggctcaaggaaaaggaactgcagtagaatacgggttagctcaagtaacgaccggttaaaaggaagacatcaacggacctgcatgcccacaatgacagcattcaaattcaacacgggcttccagtcctctcgtagaatatttaagcagacgttgccctccaagtcgatattggggtggtagatcttctgcgtgcatttgaccttggggggatcatgggggaagttctgattgacggcaaagctaaagttgaagacgccacccttatacatgccctcgtccggttcgatagtcaaggtgaagttaaggatgtcgtctgggttcgggaaagacattttcatcgtgctgccgagggtgagttcttgaaggtctaaagaaaaacaagaggttagagatatataacaataagccattaatcaagcagcgagagtaataatgtccgctgcgggagagtcactcacctcgttgcacgcgtaattgcgccgcggtgaccttcttcttcttcttgcctccagcaccctcggcattttcagcctcctgctgcttttgcttctgtacagacggttaggaatagtttgattttatagaagcgccaaataaagccctaccatcgaccagattttcaacattttggttgggagtgaccaccccacctggtggaacggacgggtttccgggagagcgaagtagaaagtttatggcgagataaccactctggggatgtcagagagtaaaggagagacagaagccagatgcagagctataaaaagcgagatcaacgggtgacaacggtgacaatgatgagagtaaaggatagccttgtgcttgcggggtctcagatcagcaatcgtcctttatcgcctctccgccttccattgacatattcgacctcgggaactccgtactatacacagtctatgggatatatatctctactaagtattgaaatctcgaggagaaaaaaattaattgaatatgaagtacataatcatagcgctccgaatgcgatcccggtgcatggctgatccgacaaaaaaagatcacagtaaccgtcaaggtaaaaccgcgcgaatacatactggctggcattgcaaaatgaaaagagaacagaattgggcatctttaggtagaatacagatcacggtatgggaaagaaaaaggagaacgaacaggaaatatgggtcaggggggtcatgaaaaaggggcattttttgctcgctggaattcaactaccggcgtgcaaagcagcatttgataccagtgcgacccaggaaccaacagcatccaatgaagcggaacaatgccacaatggcgttggaccacaagagggcctggaagaaacgggctgtacgggcggtggcggtattctatgatcatattagctggtggtctaataacaaggttaagagaaagggcgaaaactcactgtgaagccgaacttgtcgacggcctcgctggtgatgcagacggccatgagtgcattactgaagatccaaaaggtgacaagtcgagtacggaaactcttgtaggagtcctcgagggtcttttcgtcgttttccacgggggcaacgaatggggtgagcgcacgcttcacagttgcctcgaactgactgtcgatatccgcttggggcttgtcaatttcttctattaccgcttccttgctgccttcgtcctttgtggtcgtggctgacggcaatgcatcggccttgtcggaacccttcgtaccccaggagacatcgtgccaattgctgaaggcatagacgttcaagatgttgatataggacgactggacaaccatataggcagggaaggaggtgaacatgtgccatgggtcagcgtacatgaaggaggcaacgaagtaaagaccgaatgtggcagccaaggcaatgataatgataccagcacccgtcgaaccgaagaaagagtcgaggaaggcttttacgcctttgtcggtaacaaagtccatgggcgcgccgccggtgaacgcacgaacgaccaggtagatcgaatcgaccacaatgtagacctgaatgagaccgaagaccacgaatgaagcgaggtaggagaacttggaacccttgggtctgttaccgagcgcgagaatgaactgcagcaataggaaagcgaggtatccgtacttgacaatggtgttgataatgggcgtggccgtcttgccgaaggggaaagcggtttgtccgttgctggcgctgggagtaccgacaaggtcaatgatgacagtggtggtcagccagtatgatgccagggagaaccaggtgaggatagtgttgaagatgttatacaacatctgaatgtggaggaagaacatgcgcacgatgttgtgaccactcttgtacatacgtccaaagtgcatcagcgagtaaataccggctgcaaaagaaccgttgagccaacggcgacgctgggagatgaactcggcagcaccttcgggcacatcagtttcacccttagaggctttgacgtaggacaagtgccacttagagcctgctttggcgaccaactcgaaacagagaattcgatcctcggccaagaacatgttcttcttgaaaatgttcataccctcaatacccttctttccgagctgcttagacagcgtgtgatcaccatggaaatattgttcgagagggcgacccatgattgcacggaatcgataggccgagaatgcaccgggcaagacactaacgtaaccaaacgaactctccagaggcttatccaagatgttactgatcttgtactcgaagttctgagcagccacgagagggttgatcaagtttttccatcccttacccagcatagcgtgaatttcaccacaagcgccgccgagatccttgtcgttatagaatgcttcccagaggtacaacaacgacttagggccaggcttcgtaccggcatccagaaggatacagatctcggggttcagaatgcggccgaaggcgttaaagagccaacgatgcgaattgatcttcttgctgttcttttgtttcaaacagaacatcatttgcactggtgggagtgtgctgggcccatcgtccgtaggccgaatgagctgctgacttggcgtgaccgaaagctgagtcgtatattcaaactggatattctgttagcgctatttcatttggagccatattccgtccacttacaatatgcgccaaagtctccttgccgtcaacatcgcgcttcatgacaccatcctggtagataccgacagtcgcaagaacgtcaagagtatccttgtcgcaagggtcaataccatcaaagaccagcgccacaacaatcttctgccacgcgggtccacccttgttccagaactcggatttcttcaggttgacaatgtcgcgaatgttctgcatcacaccgtgcaaggtacgggccgttagattcttatcctcgttgtagtaggtaatcgcgatgagcagctccgtatgacggttgtacatcgcggggcgcagattgtaaccattgtggagagtgaattcgttaggatcacaagtggctgcggtgtctatgaagtgaaggctcattagtctttttctcttagagccatatgttcggtccacacgtacatcgcatgtgggtaaactcctcgcttccaccttccacgtcgttgcggtatttggcttggatggcattctggatggcactgggcacggggtagtcgacactcaggacggaaccctgcactagcttgaccttcctggtagcatatctgcgcaagccaccgccagcaccaccaccgacaccaccgcccccaggggcctgtcgctggcgccaagcctctgtggatgaggtttcgctgcgggcgtagggcgatgcaactcggccggggaccccaaaggctgccgcggtggtctcatcctggccggaatagacgttgccagtattatatgggtcgtggtacgaaggggcggtgtccgctgcgtaggtctccgtcaagctgtaccccgaagctgggcgctggggagaaacgccgcgcgagtgggggtcatcaaagggcgtcgcgaatggaccctgctgttgggacaataatccgcgggctgcatcctcatcctcgcgatactaaagaaaaaaaaaacaccgaggtcagctctagcaactagttcaccgcctctccacacacatacctgcgaagatggcacatcctgcagatgaacaccgtcatcgtagcccggggagtgcgagccagagccgtggtaggccatggtgtcgcaaaggttgaaaaatcagaaagggatgtgtttcaaagctgacaggagaggggtatctgttcaagcagggcgcatttatgaacaattatcgaagcaacggggctaggggaagggagaaagtgaaatctgtttttcccgagaatcttggaatattgcaaatgttttgaatcaagggtcaaagaaaagaaaggaagagaagggggggaaagggtaaaaaaaaagggagacagtcagactagaagggtcaaaaatagaccgtctctaaccccgtcctggtttagtttcccctttattttgggggtttttttcatttgactagtttattggaattatttgtatctttaaatatgtacggagtatttatttttgactattctatactagccatggatatccttgacttagtcgtaaatcgcatacatactccatgtccatccctggagaacaatagcccgatggccccccgaggccctatggaggaccctcactggttaggaggcgaaagctgagatgctcggaattctgacatttactctagtctccttttcgttctgattcgtggccttctattgattctatgatgctttgggtagggagcagccttggaactacatacatactccagatcttttatacgtggtactgagtggactagaacacccgaacctaataaacttgctccactggtgaaacacttggtgaatagacctctcatataagagttcagtttggttcacctaggtagatatagagaattcattccacattcttgagagaacaacaataccattagaaaaggcttgacacctagggcggtatgcccgactccactataggtgtttgaatgccagcacataaatgtgttcaaagccctcggctacagcgtcccgttttaattcctcaattgcaggctgagcttattctgtaattctttgtgtatggttattctatcattctaccaagtactctagcatgaagtatactctgaggtcacctgactctggtaattttagacctcactgtggaccctaagcatttagcgtatgtatattttgctgtgccaagtcgattagcctattatattccaaggctaacattaaccttgggctgagttgtgctgatgttcagcctcgtagtcagttcattccatatgcggtggctatgtcactgcgccccgaggtatacgatgattaccatgggttgaaaatttcgaatcttaatttcccttaatgtccctgatttcccttttttccccgtttccccaattccccaattcgccaagataataagatttcagtgaccccattcgtctggtccacggaaggcagttagagattaattgccgctaacccgattggggaaatacaccagaaacagcacccggacaacaagataagcagacaaaccaaacaaacacgccaaacaaaccacaaacaaaccaaatcagacaaacagccaacgaaaaactctatttctcgcaatcttggaaaatcgatgatccgagagtccagacccgcggaccacttgcaggcacagtaagatgcccacttatgttcctcgcatccatgtaaggtgaacatgggatgaaacaatctgatagcatatttaatattaaaggctgtagcatctcagatttcacttcatttttccctgcatgttttcgccttatatcctctctacaccagacctaggtactactataaaatatacaccacaacccgttgtgtacctgactaccccgtatattacccgtggaacctcacgggcccgtgaccaaggcccccccaattatccccccgtctctcttttgacttgtcatactctctatctccctctctctctctcatttattcatctattctccccacactgatcttgcgatcgggtgtggtttgtgagtcgattttctctgatacgcgcgtcgggccaacgtcaacaaatcaagcccccctatcccgaccgtctttgacatatacaatccctgtcaagtgtctggaccattccgaggaccatgaccatcacttaaatcgcatctcgaccttgatttcacacacgacactcgtttcctgccacgcctcacggctcggctttgatgatctactgtttacgctcacgacttgacgccgattgagcaccttacactccttttttcttattttatcttgcacattctttgccgttgaccggctttatcgatatctttctctgttttttatctcgatcttcctcgcctaccatgtctttcgaacccatggattccgccttctcccccgcccgctccgtcttcaagcgctgcaagcagtgtgaaaccacatcccccgcctgtcccgcatgtcccgatggatcaatatgtaccatgaccgccccgagctgtgatgcatgcgccaccactaagtgcgtttcaacgggcgccgcgccctcgaactccgggggcaccgacactggcgctattgctggtggtgttgtcggaggcgtggctgccatcgccatcgttgtattcttgatatggtggttcatcatccgaaagaagcgcctggagcgccaggaggcggagaagaacggttcattcgcagcagctcgcagtgaacgccggtccatcgcctctacagtcctaacccgtgcctccaatgtaatccaaatcgcttacattcctggtgtcaccaaccgctctccaccgcagaccccatccacccttatgcctcctattccaccgcttcctggtgcgacacccgatcaacacttcttcatgccgggtgacctgcgtgactcgtcatggacgaccactaccggccaccagagcatctcccccactttgcgcagcagtgtggccaccaccatctaccgcaacgatgccattgtcagtgccgttcctgcgcagcagatccagcggactcgggcagccgtcgtgagtatccacaacggaggacctgggtcagcgaatgcccctggagacgactcgcccgttactgtcacgattacccctgcagacgcacccgctgtcccagccattaccccggcgcaactcgctcgggcggaggctgtcaagggcaacagttcatgtattgctcgcagtgtaaccgccaagccagtgatggtgcgtggcccttcggtgaagaacaagcaagccaacaacgcgcccgctgccaaccgagtcgaagagctgtccgggaacagtaaaagcaatgacaccagcccgacagtatcaaccacaaacagcaaccagtccagtccgttctcatcggtcgaagatgaagctgctgattcttcgattcgcgacgcacgtcgcgcttccggcttgagtgacggacgtaactcccctcggacgccacccgcacgggtagaaagtccattctcggatgccaatgaggtgaaatgagctggtctgggaccaactgggcgcaacggtttttctattttgtgatttcccactatgctttctctgtatgtatggagcctaccatggctttttgtaccttttagatatgtccttccttcgggtgccttgtacagcgagtgttggcacactgagatgggattgtcgattgaatctttactctcattcattttcattttggagtatcataccttcacattcgtactgccatgagaatccgtgttacactgtcctataggcttctttcggactaaactatctctatcgcgaattttccaaaaaccgaagcagataaaatgtttaaagtaatcgcagaataaaaatgagacccttcccacttcacttctaaagtcactcttgactactagctcgcagacggacttgtgctgtctttacatggagatagtatcaccatgcttctgatttatatacttaagactagccgaattcacttaactacatatttttcgtcatacttttcgttttgttttgttttcgttttctcgaaccttgttatatatttcccagctcgaacaacaccaaacacacaagacctatacacctaaccgcccctctagcccgccccaagatcccaaaaccccttaaactcgctatctcgcttcacaagagcgggaggacaatcccattctaggagccgaccaccccccataacagcaacacgatcaaagtcgacgacggcaccaaggcgatgcgcaacagcaataacgcgcatcatatcccggatgagccgctcggaccgctcatcgacgttgctactcgcttcgtcgattaggacgatctgtttgccgaccagcatagcccgggcgatgcacaggagctggcgctggccctgcgagagccggtcggcgtctagcgggctgtctagaccacccagccgatctacgacatcgtccctcttgagctggtgcagcactgtttacccatagtaagaggttagtgccgtgtttttttgtgtcacattggggcttgggggcgctgttaaaactcacatcagcagaaagcgacaaagggcacaagtgtggatgcaaaatacccagaaaagacgcacatcaggatgaccgacatgacgatgagggcgaagggcagctcggtgtcgacagccgacatgtcctggctgaagcgattcgtggtgactccgacgtcgatgcgcgagaataaggccactggggtattcatgacggaatggagaagccgggcgtggagaacctcggagctcgaagccaccatgacgaccaggaagagatatgcagcccctgtgatgcccaagacggcaagaccagtgagctttgcgaggagaccgaggcagtagtcattggtggcttggccgcatccttctgtagtgtctgtccagaagctgagtacgagtgccgtcatccgataacttcccgcgtacagaatggtgaggacagcgagcagtatggtgtgccatacagggacggagccaaagtaatacgcatatgtggcaaactcgccgaggactcgtccgggcgattcagagtcgtcgctgtcctgttcagcatcttgttcatatcggccccgaggaacagtctcgtggcgatgctgcaccgatgcgtcagctgcgtcctgcgtgtcaatcgcgccgttctgctcgactgctagcccatgcggataatctgtatcggattgaagttgggcgaatgacccctgatgcatgatatggccgctcacatccagagcgacgacatgatctgccataggcgagtctatggatggcgttcgtgacacagaccatagttatgctcatctcttggaagagacccgtctcggcaaaaagattctgtaagacgtgctcctcggtcgccgcatcctgccctgcaaagacatcttccaacaagacagtcttcttcgtggattagacggctcgggccaaggcgagccgctgcttttggccgccgctcaacgaagaccccgcgctgcctgcccttgtcgcatcttcgtcgggaagctcgttgatatcctactctagcccgcacgcgtagacaactttgtcgtaccattccgcgtcgtagctggcactgcctaggatattatggcgtatcgtcaggttctggattcagggctcctgaccaacaaacgcgatattgccgggatcggcatggatggaacccgcttggagcgggacttctcctagaatggctcgcatgagagtgctcttgcctgagccgacaggtccaacgacgaaggtgaatctgcggattccaacagtgatgtcgttgaggatgtccggctttccgggaacccagccaaaattggctcctgatatcgctacaagcgtgtctcctttctcatcggcttagcttggatgatgatcccgctcgcccaagggcaggaacaagagcagaaatccatcgacgaaggcgagcacggcggcggacgtccgcaaccgagagaaaggccacttctctgcattcagagcccagtacaccaagactgcaagttatagagccgtgtagacgccgatcaacccctgcagttactgaactagtcagtagttgttttttcttgggccagagaaaaactagggcggaggttatcacgtgccacttccacgattggccggtggcttttggcgaccttgcgaggctgtctcgcgagccagaagagactctgtagggacacaaccagaaatagagccgaggggacgatgcagagaatggcgtcctcgaaggctggcataaagtcgaaagcgcctgtgctagcaacgacggcaaaccgagcttcgggcgacatttctaacctctcacctagctatcctttgaagccttatcaaaatactggaaggctttcattggagaagttggttatattgggctggttgcgcgatatgaaggaatctggtgcaatattacgtttcatggcgtactggcggttggagactgccataggaagggaatcggtcaaatacgtagatttaccattaacgtttgttcgaaacctgcttattggtcaggtaaaatgatacaaggtcaatgaaatgatgatcagatcatagaattgaatcttgtcttctcgttctgttgtgcccctttgtatacatcagtaccccgcttccaggtcccaacgacttccagacctatatcgtaggcggatcaaggaacagtactccgatccatagttttacactgttcctctttgacaacgacgaataatattatgaaagaagagatccataacacaactactccgtattcgaagtggcacccactaatcgggaaggtgggtactataagggccgggccgtgttctggaacaaccacgatgttgtacatactcgaatctatcattttattaaattctcattaaatacgatgcttgaagtagaggcaaataagctcctagcattggagaagatagagagagtaagccatctttgctcaaactaggaaatagggccttggctgagagtgacaagggcatatcgacaagacctgattttgaccgtcacacctataagatgtacattcttttaacactatttgacatgtttcttacgcatatatacaagcttctgcacgccttccggttgcttggttgaatgattaatatagattacataaaactaactagagtggtgattggcccataccgctaaaatatattccccgaagtacataaaccaaactgcgttcaaatccgagtccgatcctaatagaatctataacagcccgacagctcccttattatatgaatattccactcatccctgagacttttcttgcgtcttttctgacgaattatgaggtacgtcggggttctcatccaatcgttcggtaacaagctccttcagagaatgttttggagaagtactggggaacatgtcagatatatagcatgagtggaattgtctattgcctcactcacgatgtaaatgaattctcgtagtctgcccggatttgcctatctgactcttccttgtccacgatcttttgaaggtcttcagggagaggctccgaaatcgactctctgtcttcttcgcgttcaggcataatgttctaggatttagatactataaccgtggatgtggataagtctagaatcattccaggtaggaatgcggataatataggctactttgtatagatcggtggtaccgcggtagacatggagggcgcccctcacattattgacgtcacgcgagacaatccggttatctcctgaacttcgggcgacctgagccgtccgatcgtagaaggttcacgggatggtgagtcattattgcttcattatgatgtaatgcgccgaaatggcctgaggtatggatatctcggaaatatgtcggccaaaacccccctcatatcttccctcgccatcccctccatcgcggtttctcaatccttgccaatcttttctagcacagttgtacggtggccgaagtcatcttttgactaaagaaatgtccgagaaagaacaaaaagacggttcggcggctctcgggctgcagaggacagagactaaggagtccctggaggatttgggaatatcagacaagtctccaccattggacgtcaactatccagaagttggtcgtgcagagaaccctgaattccccgaggagtacaccatcgagacgaaaactggcctcgtccctgaatcagcactgaagcaggtacgctctgaggcgagccagcacaaggcctcacggcaggactcgaaagagtcaggaaagcgttaatgaccttctcctctccgacaatgagaatcatcatgctgtctctttagctgcatcatttgtgattgtctacattgcatattccatgtccatcgccaccgacttcgactcgagggatcgagcttcatttgggaaaactacaacatctcgctcgaggtcaccacattcacctgctctatcatcgtctgtggattcgtcacgcctctgcttaggtctcctttgcccgacacaattgatcaagggcctgaatacattgtctcgctgagttggtgtttgcattcaacatctcatatactccgtcgccgaatattggcgggctccttgtctgcaggttcttgtgttgcgttccggttcaggcctatcactggccggtgattgaagagcccatcctgatacagctcctcattgtgattctgtcgtcggcccgattgtttgcggttgaatcaacattggctcgcgtcgtcttgaattgttcttttgcgttaatatagcgttttctcgttgaagctattcttattatacataaatctctaattttccactatataatgacatattactggtgtttaaaaaaaagtgatttaattctgccggacttaataattctatacttttgaatcctacttgatatacggagttgtcaaaaaattcctacactttgatcagataacaacgtgtatttgatcgcatacctattctttcaatcccttaatcatgattgatagagcagtcgttaaaatagttgtgaaagcagttgttgacgatgaagtagttgatgtgataaaagtgacttaattttgttagtggtttatatacaaattgtaggtatctaccgtcttgctagnnnnnnnnnnnnnnnnnnnnnnnnnnnnnnnnnnnnnnnnnnnnnnnnnnnnnnnnnnnnnnnnnnnnnnnnnnnnnnnnnnnnnnnnnnnnnnnnnnnnnnnnnnnnnnnnnnnnnnnnnnnnnnnnnnnnnnnnnnnnnnnnnnnnnagggggggggggggtcgaattagcaatgggagtccctgtcagtcacaaccccctattcttatacatacctcaatcgttctaatcaatatggcaggcagtcgaagataggtggacaattatacagtgggaaggcttcaaacccaagagataagggaattccaggatttgcataggtacgaatagcgtcacatctattgaagtagaaagggaaagaatcgtgagtcgctagaagaaagacagatcctcacgtctagctgtttgtaaacatggaggaaaatcaagggtatataaccagaatatctagtcaacaatgctcagcatccggtaattcaagccacactctcatccagccccattccacgtccgattttacgaatcaatgcccgcttgagaagagcttcacgtgcaagactccgtgtatgccgtgaccaggaatcgacaccaataacaccgcggaccagcgcagcctgcaacgcatagagcgcttgctgtataccttgctcctcggccactaaatcatatagctgtttccctaccacggtgggggcgactaggacgtcatcaattgggggctggccggccggagtgtctggagtagcggagcttgaagcagcgccagaagcggagacagagcgggcctgcgcgtctgcaatggtagcgtcggcgcgatggatagattgctgtaggacagcggtgttggattggagggtcgcatggagagtattgagcgccgagagttccccctgcagtgtggtcatagcgccatgcagggactgtgattgtgagacaagagactgcgctgccgtgtcggattgagcagcgttagcacggagggtttccgccagggtctgggacacgacatgaaggagtgcatctttctctgggtttggcgggatgggaggcgctggtcctgctggcgcgattgagggtagctcgacttcaaatggcgaggttagaaggtcgggtgtgtcggccttgatgggagctgctgggggtggacggggataattggatgggtatggagaatgctgaggatatgggggaccaagcggttgctggtgtggttgctgggggaattgcggctgcataggcaagtgagcccccgtaggttgagcttgaagagggagttggcttaaagacccagccgcatgatggagcggcgcaccactgtttctataatacggtgcttgaccctgcgccgactggggctgccccgctggctgatggattggtgggtgtgacaagggacgaggactgcttatcggccctccagtttgggccggtggcgcgtaattctggtatgagtggattcttgggctagccaattgtgcggacacatatggttgacgagagccttgctcttttggtggaggtagcggtggggaatattgatattgatcgaccgggtgccgttgttgttgctgctgcagatgttctccagccgcgcctggcttcggcggaggcgggggtggaatctggctctgacgctggccttggcttgtaggcggagacatagactgagcttgtcttgaagatccgacaccgggtggaaggggaggtaagggcgggggtgtttgcgcagcttccagctgaggatgtggcacttgttgtctgtatcggactggtggctccttggcaaatacatcctgaagaatagaaagaagatcggcaatgttggatctctgtgaataaaatagtcagcggtctgtaaacccatatcttgcgagcactaacctcccaggcttcagcccagtgtgctagatagtggtggtacacctgtccctccagcgtcacatgttgcccaactcggacagccatttcctgcgtcggcgtcacgtaggcaattggagggtcgcgtgggtatgtatttggaatccaaagcgcaatgggaaatcgatatgtcgttcctcggaaggtgacaggcaacgtgcccacaagatgaaggaggagggccgagaaccctgtctcgtaggctgctgggcattagaaaatatgaatcgcataagaaacatatggacactcactgtagacatctgttcgaggggagagcgaggggtactgggagagcgcattggcgacatcgtggtaggtccggtttgggtcgcggtaggtctgttgtggatcatagtgatcctggaggggtttagtaggtcggataacatgaagttttcggagagaccaactttggacaggacactatacagccaattcagtgtcctctgagggaccgccatagcgagaggaatgatggaaaagggttggaggcgcgacagtttcctcttccccgcagagtttcttggcgaagtatggaccttgtggtcttttcaaaatgttgtattagaagatatattttgataggagatactatttcttagtagtcttagtctctatgatctaggtataggtgacaaggtagttccagtgtacggagcataactactaagcaacttggtgacacctccactgcgccttaactacatctccgtacaccttacacctcacctcaccatttcatcattgaaataatcttgtcttgcttttgtcccttcgtaacacgagaagatacaggttcgagtctgaataaataatagcactccttttgctgctgaagtctcgaggagcgagacagattcgctaaatgataggctaatggtctgaatcagagacctctgtcttatatgacacgtccaggcctctccagaactctatcgacaaggcacatccttgagatcctcgaatccctggaactcattgacatcgttaaaatcctcgaaatccttgagtcggggtttgtatccctggaaacccggaacaaagaaaaccaagcttgagcttcgcaagccagtgatattcacaagaaagcctgagtattctgaagatctcatgcagccattatcacccggtacctagaaattgatgggctcctttgtttcatttaatattgttcttcccattcccttagtattgttcttttactcacattgaagggcataatgatctggacctggactgattattatacattgccttcgccattgtctgtctcggtctctatgacgctggccattcaccctgattctcttgatgatattgctgatttatatttacaagtcctacaagggcttttaaaacagacctcatcttctaacatgcatacttcgacctaacttcagaattatctatgtgaccactcctttaattctttcaactgaacttcaattaccaaagtcatggcggcgacaccatctccaagtcccggattcgatccatccacccagaccgtcatcttccacctacgagatggcactgagttacccgtctcagttcaagcactggacatcttcgtcatgtacaatgtccgggtatgcatcaactacggttgccagtttggggcatcgctcacgttgctggttattcttctgcttttgacccattccgacaagcgccgttcggcggtttttatcctgaacgccctggcgttgttcctcaacagcgggcgtctgcttttccaagtcatccacttctctactggattcgaaacggtatatccattcgtctccggcgactattcatccgtgccgtggagcgcatacgccatttccatcgtggctgtcgttctcaccaccctagtcgtcgtctgcatcgaagcatcacttgtgattcaagtgcacgttgtttgctctacactatgtcgtcgataccgacatcctctcctagtgttatctgttctggtcgccctggtgccgattggattccgctgtgcatggatggttgtgaactgcaaggccatcatcacactcaactacatgtctgatatatggtggatagaaagcgcaaccaacatctgcgtcaccatcagcatctgcttcttctgcgtcatcttcgtcaccaagctcggattcgccatcaaacagcgccgccgactcggcgtgcgcgaattcggcccgatgaaagtcatcttcgtcatgggctgccagaccatggttgtccccgccatcttctccatcgtccagtactacatcactgtgccagaactggcctccaatgtggtgacattggtcgtcatctcactcccactctcgtcaatctgggcgggtgccgccctcgagcactcccgacgtaccggaagccaagatcctcaacgccgacgcaacttatggcgggtccttgctggtggtgcagaaagcttactgtctcccacaaaggacagtccaacgagcctgactgctatgactgctgcgcagactctgtgctactcggaccataccatgagcaagagctcatacaactcgcgcgacaacgatgctttctatggaatatcggttgaacacgatattacgatcaatcgagttcaaagaaacaatgagatcgtgtgatgagcacagcgctccgcaattcagagataccctcctttcatttcgatgtacaggatcttggccagacatcgactttacgcgtaaattgtttttttttttttctttttttcttcaattgggttctatactggctcaccattccgtttggctcaatctgcaaagtgtaaatgcattcttaataccaagtcatattcattatttttcactccttgctttcgagagccatagttgcattacatgacgtttgactgcattgtagatctacgagtgggtgaacttgagggtttcccatgttctttctcactaatagtaagtgtctatattgaggacaggttctgctctgaagttcaaatggagtctcaacagtaagaaagaagttgagtataccatcgaggatgggattagaatacatatatgtatgaagcttgtgcaataaatacagccagtctactgaatgcaacaaattgcgatgagcagagtcaagtgaattaacaatacataaaaaaaagccacaaatatttacaggtgaaacgctctatgttcagaaccacatgtgcgccagagccaaaggacaaaaaggagctagaaaattaatagtatccggtgctaattcagttccacatagttggctaggaatgttagaaaacgtaataaattgaacaagaaagacttgaaacacttacccggaaactggccctcccgacctccaattcgcccagaccaccattcattggtattttcagagcgctgggtaatctcaataacatcaccagctgagaatcccagatcaccgtgtgcctgagcctcgtagtcataaagagcggtgacagtctcaaccggcttactgagatgggacggcttcgcctttggaggaggcggggcggccttgctcttggcggcggaagagaagctgcctgtcgggctagcgccggcagacgaataaggtggtggagggttgtcatcggtggcggtggaggcggaacggcctcggccgatggagcctttggtatcggatctcttgctatcggatctcttgatatcgcctgccttgcccggagggcctagtttggatccagagcggcggacgccttgggttttaaagtgcacgatggtaagggcttcagcttgttcctggatattgccgcgcttctgctcaaaggcctcttccacgtcgagttcaagattgaaataggcgatgttcataccctgcattcgttcgtggagggtgtagaagacgttgagttgcatatagtagaaagactggaagagcgggcggatgaactcggcttcgagggcgaacagcttgggcagttcgtcctttagtaaatcgttgtaatagttaaactcctgggttgccacctcaacatcgttctcggctttgtatagtgctttctcgtctttgagcgatttgtcctttttctcttcgagctttttcagtgtcgcgttgcggcgatcaaagtccagcttcttgtgatcacgcttaaccgcgaccttccggatcaccttgatcacctcgagcagctggtcggccgggctgataatgcggctgttgatcatctccagctcgggggctagggcctcttggagttcctggacaatgacttcatattcctcacaggcctggatgccctcggcatttccttcgaattggtaggaggtgggatcggaggcgcgaccggagatgggtttgtagatttcggcgactgctttggagaattcaatttggtggctcaacatgcctgcgcacgcgatcagtagggagaggtatagagtggagagatcaaagagttaccattaatggcagaaaagtatttcttggactcatcgtggagcttcttggtctctcgctcgagctcatcaaagcggcgttcggcatcggtatagacagcatccttggaatgctcaccgatgttgaacttgaccttgaactgctgtggcgcacgcgcaatactcttctggaagcctttaaaactcatgatgtggagtatattaaggagagaagtgaagaagagaaagtgccaaggtggggggaaagaagaagaaggaacccaaaccttttcaatgacataagacttggccagcgttgtacggagctgatgtccagtgtggctgtacccatttccttttatactattccacgctattttgtactattctatacgctactgttctgccctatgatcatgtggcgcatatcttcttaggcacctggattacgacctacaacatacatactacatacggtagtacttcaactcctgtccatgttctatagtgtatagttacagagtactccgtacatattttagctctaaacacctcgaatggttacagtgcttacatctctactctcgacgacctcaagaactgtttctctttcctcggcagccttacccgagaatgtcctaagatcaaattaaggaccccagtccgttcgtcatcattgggccattcttccttgggacgtgcgggggggggtgacttggcaatgagatgaaatgggtgaatacaagaagtcggaagaaagagggctctaaaatgatcaaattagaatcctcaagactgttataaaacagagaaatgaagatctgatatagtcatggacgccctggatacttatacccgaaaggggaaagctcataactccgtcatgcctcaggcatcacggataaactcaattgggaaaaccccgagatctttagtcattgggaggagatgcaagtgataactaacaaaaagtcgtagcgtttccttttcatcccaccttcaaggatatcggcacaaatcatctccataatgacaagtgctgttcccactgcttggagacaggcctctgccttctccaggcgtctttcaacttatggttcccgagctcctcgagtcctcgccaccgggctgcgcggtgctcgttcttatgtatccgaaacaaaagttggccaagcccaggttaacatcgagactgccatcaaggaggaacaaaaggcattcatgaaccagtcccacatggcgccccagagcgtcaagctgcctggctcggcaacctccggtgacgccgcgttgagcccttcggccggcatcctgaagcaagccaccgttatggaccagggcacccggcccatctaccttgatatgcaggccactacacctctggaccctcgcgttctggatgctatgcttccttacctcaccggcatttacggtaacccgcactcgcgcacacacgcctacggttgggagtcggagaagggagttgaggaggctcgcgagcatatcgccaagctgattggggccgacccaaaggagattatctttacaagtggtgcgacggagagtaacaatatgagtttgaagggcgtggcacggttctttggtcgctcgggaaagaaaaatcatatcatcactacccagactgaacacaagtgtgtgctcgacagttgccgacacttgcaggatgaaggtttcgaggtgacttacctgccagtgcagagcaacggtttgatccgcatgtcggatcttgaagaggccatgcgtcccgagacttgcattgtcagtgtcatggctgttaacaatgagatcggtgtgatccagccgatggaggagattggccgtctctgtcggtccaagaaggtgttcttccacaccgacgctgcccaggctgttggaaagattccgttggatgtgaacaagctgaacatcgatctgatgtcgatttccagccacaagatctacggccctaagggtattggtgcttgcttcgtgcgtcgtcgcccgcgtgtccgtctcgatcctctcatcactggtggtggacaggaaagaggtctacgtagtggcaccttggctccttccctggtcgtgggctttggcgaggcatgccgaattgctgcccaagatatggaggtaagctctttcccattttctatttcccgtttccatcattgctgccattattacgcactgtgatagaccttttggagactaggtaatccgtgttcttggacatggtactcagttccaatgacgtcaggcgcgggcgtaatgctggcagacagatgaactctatctttcccgtcggaaaacagtatgctaactgactggttaatagtacgacactaaacacatcgatcgcctgtcgaagcgtctgagcgagggcctccttgcaatggaacacaccacgctaaacggtgaccccgagcaccactaccctggctgcgtgaacatctcattcgcctacgttgagggtgaatccctactgatggcgctgaacgacattgcgctgtcatcgggcagtgcctgtacctccgcctctctggaacccagctacgtgctgcgcgctttgggcagcagtgacgagagtgcgcacagcagtatccgtttcggtattggtcgattcacctcggacgaggagattgactacgttctcaaggctgtccaggctcgtgtatctttcttgcgcgaactgagcccgctttgggagttggttcaggagggagttgatttgaacacgatcgagtggagccagcattgatcatattaattttattttgagagcaaaagcccattagggacggcgttgaagtgtaacaacatcggatttgtacagactggaaataatcaccacgcaattaaatactctctatcttccctctaagccccgatgccttgtacgtcacctggattacctcaagggctccccggggtctaagatatcactcgagtaagacctatgtcttgtatgatcagtctgtaatatgaacagcatttaattaatttggaattttctctcggcccaaaacccaccgtagtctgaaggctgtctactctttggcaaagaagttaaatttatctaccgagagtcaattcgtaggttgcacttgatttccacgatgcatctattcctcatcctttgcacattcgggggtaatgcagccgctctccctggtcaccgatcaccggagcttcaagtggtaacctcttccggctctttgaatgggatatacaacgactcagcacacacagtacgggcatttcttgggactccatatcgccagagttccatatcttatacggaagaatgctccaaatagactcatcggagtacgtatgcacctgtggacagggattgccgaaggaggatgcatcgatggggctttggggtggtgattttgggcgtcgtggtgcccatcgcagttcttggactgggggctcggcatatgtctgaagactgtttgtatttgaatatctgggcaccttctgtcaagcatcgaggctttaggggacttcaaaaagctgcagtcatgattttcattcatggagggagctgtgacactggtgctagttcggttgcctactacgatggcacgaattcggtacggaatcacgacgatctgattgttgttacttttaagtaaggagatgctgggttttggctattagatttactaaactctggccagttatcggctcaatgtttcttggatttctgaatgccaggtatcgacccttccgagcagaatcttggactcctggaccaggtagatattgagaatctgtggttgagagagtacgaatgaactgaccatatttagcgattggcaatccagtggggtcatgaaaatatagccgaattcagtggtgatccagataggattcttctgtttggtcaatctgctggagctgcttcggttgatatccattcatatgcagtgagcacgtcgtttctatattggtgttttcatatatgaataacctctgatagtaccctgaaaatccgctcgctagtgcatttgctcttcattccggtaccgctccgttactggtttaaccattcgagtgaatcggcaggtgcccacttggaggtatctataccatggatattttaccaatctcagcccacctccatggcttggagcatatcacgggggtaagaagaaagcagctatttgcttgctggtttgattaagagcatgatgacagctgagatacctttggtttttggaactataacatgtctatgatccctttgtcagccaaggttagtgtcaggcattgcgtggattgacgaatttcttggggcttgggttgcatttgccaaggatcctcgtacgggactgagcaaatatgggtggccagcgttcagctttgatcgtagattgatgttctctcgtttgtgatttgaggctgatcatgggatggagccaaccttgatcaacctcgctctgaataacactgttcaggcagtatttactgggagttcctgggatctcttgtgaagtcactcggtctgagctgtaagtttggcggagttatattgtgctacgatgggagagctaggtatttccagactcgtttgaaatgtgttccatgatatttaccgagccttgcatggataggagtctaccccgtatacgtacgtaccttgaggcctatgatgtatacctcggacctcggccagacttattattaatcagtgatgccttatgcatcaggcatatattcttatttatgaatatggacctttattatgggtaggaaagaaaagaaaaaaaaagaaggatcaaatatgcccaaataccaaagtagcatgaggtccgatctaaatccccggctatgcatccttcagatcaaggttggcgatcctgagtgaagcgaattcgaagccaaaataagcgaaaagggcgagaataccgcaaatggccctgtcggccgtgtcttggccggtttaggccctttgcctggcactcagtttcgccttcgcttaatttgcactccacttgggtctcgcggatgcacccagtccctcttggcgtgctatcatttgattgtatagccatataaaatgtacctggtctctctccctgatcgaccggatcgccctgctcgactcctctaaaacttccccgaggtcctctaaaaagagtcactttccctcctatgtcggagcccttgcaactttattattctcgtcccctttatcctattgctcttagttaacgactaacggaatgattagaaatggtctgacggtcttacccatccagggatccccggtgaaattacgtgctgaactgccggcgaaaactctgactatttagcccagatcgtgccattttcttcatgcgacgttggtagaatccaaatattattctctttctcttccgtcatcatccgcagacatccaacctggggaagccaagtcatacatctggctccggattattcccggtctctctggtctgattttctggtataatcccatataatccttttgttccattttcaacttctcaatctctcaactctgattcttgcatttattatatttatatactttgaacccttgaatccttgaatatctgttatgttgtctccggtgccaaatcccgccgattatggaatcactgccgattatggtttcctttccgcagaacttcctttagaggtgctccccgatccttactacgccgaatgggagatgataattggcaatctccacccattgatattgagcaaacggctgcattcggtcgtggacactctgcctatactttcggccacgcacctgcagacggaggctgagtggcgtcgtgcatatgtcatactggcgttcattctgcacggctatgtctggggtggcgattcacccacagaggtaccggcccatcctattggttgaaaaagtagatgtactgattctttaaaagaggattccacctcaacttacagtacccttatttgaagtctgtgaacgactcgaattaccccccgttgcaacatatgctggagtctgcctttggaactacaagccgatcttctccgatgagccagccaccagcctggataacctagcatgtctacaaaccttcaccggatctctagatgagcaatggttctacctagtgtcagtcgccatagaagcacgtgggggcccttctattcccctgatgattcgggccatcacggcggcccgcacaggaaacagccagactgtcaccgagtgcctgcagagactagcggaaatcatcgatgagaccaacacactgctacagaggatgtatgagaactgcgatccatacgtcttctacaaccgcattcgtccttatctagctggaagtaaaaatatgtgtgatgccggattgccaaatgggctgttgtacgacgacggccacaatcccgagtaccggcaatacggagggggcagcaacgcccaaagctcactcatccaattcttcgacattgtcctcggagtggaacaccgacccaccggtacaagtcgcagcgacagtgaacaaagccccgaagccagcaccaaatcccgaaacagcttcatccacgacatgcgcacctacatgcctggcccccaccggcgcttccttgagcatatcgactcggtagcgaacatccgctcctttgtcgaggcgcgacgcggagactcggcgctgtgcattgcctacgatgcctgtctagccatgctgcgcgtgctacgtgataaacatattaccatggtgtcacgctatattatcttacagtcccgcagctcacgtcagcctgccaactccaactccccagcagcgacgaatcttgcaagcgccgctccgaccgacaagaggaagctgcggggtactggtggcacggcgctcatcccgttcctcaaacaggctcgagacgagactggagagcctgccattgatgcctgggcacgacggttgctgagcaatggccctgcagataaaaagttcgctgcgctgagcaaggttggcgagcatgcggatggtcatctggaggttgtcggtctctgtggcacatggacagctgaggaaaacgagggtggaatttgtcactggtagtcgtataactagtttcacgtttgcgtttagtcttccttcgagcgtggcattgcatgggatttatgccgtacgcggcgactggtgtttgggaacttgcatgaacttatggttattactatgctgtataaaatacattccacctggctgtgagaaagataatgctttttttgtatggactatattgtacttgtacccatagaccacactatagaaattatctttcgatacccctgtacgaatcatcaacattcatcaacattgatgtaatgacgcttgtccctggcctgaacaaaactcgtcatgcacgcgcgtatacctgatattcacgtgacgtgacatcatccaatgacgtagttcatcacgataatggtggactttgtagaacttcaatcttggaagaccacattggcccattggagaatgccctggaacatgtggcttgataacaaaatgccttgtgtatataagtggccttcctgccacgactctcagtaactaattcatcaaccacttcaatcctcaaacatctctcatatcttcactaccactaccacttccaaccatcatcatgactaacaacactggcaacgcctcgaccaatgagtcgtacctcgagcaagcctccgatcttgcttcgcgcgccatcggaaccgtgactggcaccaacacctccactcaggtaagcaatccactttaatcccaacatcatcccactgtctacaacaactaaccctacctcagaccgacgaacacaagcacgaagccaagcgagacgatggatcctgggaccagaccatcggctccgccaaggagtccgtcggcaacctgatcggcaaccagaccctgcgccgcaccggagccgagcagaacgccgccggaaaggagcaggaagccaagagccagctccagaactggggcgagggcattgagaaccgcgctcagggtgctattggatccattggtgctgctgtcactggtaaccgctccgaggaggataagtaccgtgacttgcatgacgagggaaaggcccatcagctcagtgctgaggctgatatgatcaagaagaatgctgcttaggcttgacttgagatgagatcttgagtttgggtttttctttggtcgcttgtttcattatctttctttggtcaggcctgttttattatcacgacttctacgatatgatatccaattgatgccatgtttttattttacttctatcttctgcttgtaacagtgtatgatatatatgtaacgagtcaagttttataacgccatcacctaactacagcacgctttacctgagaactcttcctctttctctatttgagctatggtaattaaggcacaggtctcgatacatgtgaattctacatggatcgaccgcagatcatccagcccctctatgcaatgctacatcgacatcccctgcatttccccgcaaagaagtaataagtaatttcccgaggaccagacagattggcatctgattccgaggctggagaagatctagaaactcggaattttacgaattaaattagcaagctatttggggactaattgtatattccatgccactgtagactaatgcggagagatcttagccaagcaggttaagcatttgatataccgactctgccccatctgagtacctagtctgtataccttttgtctctttcttctctgcacttgacaaaatgaaattcacgacagctttcctctttgccgcaacagcctggggtgctcaacaccaccaccgacgagataccacaaataacggcatcaaccttagtgcaatcacgagcgcactgtatgtgactctttccctgaatatctttcaacccactaacaatcccacagtgagaatctaatggccaaccaaacagccagcgcgaatttcgccaacatctcgccgccgcccaagtcgctcatccccgagatcctgtcagtcgtgcccgtatccgtcatctgggaactcatcaacccagcggagcgcagttccctcgccagccaattcaaggccggtactaccccagcctggtacagcgctctcccatcggatgtgcaaagctacatgtcggtggtcaagtcgcagatctcggcgggggcattgacagccacaacgtctgagatcaacgctgtggcaaatacagggactgcagcgactgttacagcaacagcctctgtgaccggtgccactgctggaggattggcaagctcgacttcgtcgaagggtgcggctgcacagcccacgggcctgaccgtgtcggcgttgggggcgctgggtgtgcttggactggcactagctctgtgatggaaggatctacacgaattgcgtactttttacggagtaaatacgattgtgatgagagatgttttccgaaattcaaaagattggttccgtttacacgtgaattcgagtataattatttccttttcgcttatcttttctatacaatgcacgtatggtggagctcaagatcgttacattaagcacatgccgtcccttttcttatagattgaatttaatatagaagtatgcaaatggcatcatggtataaagtatatgcagggttcttttgtagacaaaagggacagcctttgccgatcactactaaaccgaacctctcctccgaggttcagggcaggcattgtgagacaagcaaatgtcgctaaccccaaaaaagggcaaaaaagggatctactcgacgatcttccactaaaaggcgacatcttgaggggagaagagacttgcggggaaatgctcgtattggattctcttcttctccattcgccattccttccatgtctctcacatggcattgcttatccctcggcctcatttaacatctagatcatatcgctattagcggcctcggacaatttccacaaattacgctaatgagagttacatctacagaaaacagaccagcctcctataagacactggatgtgtttgcctcttcttctctgctcaatcctcacttcaatataataacaaaatgcgtttctctcggatcctgttccctttggcctttgcccccttggctctagctgctcccgagcctcgtcccaaccctgtcgctgcgccagccccggccaccactggtggtctactagaggagctgcctgagcttcttagcggcgcccagagcctcctgagcaccgataacatcaacaagctggatactatcctcgatggtgcggccaagttgctcgctgccgataatatcgatatcttgcaggatatcttgacgaacgcccacagcttgttgaccaagagctttgtcaataacacaactacgctcattggggatgctacaccggtatgtactgctttttttgcttttgctttctgaactgtgtactaatgtaatatagctggtcgaggatatttctaagcttctgggtggtgtgctaggatcactgtgagggttgataaaaggaatgaatcatgataatcactttagttatctttttattgcagttatagcatctcttgaatgggtgtatgtaaacggaaattcaattgaaaccttcaaaatacacaaaacaatcatgtctttcataacgatcgggtatatacagaaaaatattagactagaacacagaatcacactcaaccctccttcatattcatcttctccttgagccgatcctggtagaatctcaaagggtatgcccgccatttatcaggcatagccggataaagagcgaccgagaatcccatccaagtacgataaagagcccgagtcttaaccgtcgagcgcagaccgtaggcatcacgcagactcggaggcagcatctcaaccgtaatgacatgcaaaaaaggcttcaaagactgcacccagcgcggcatatcatgactctcacgaagatccttagcaaactgagccgcatccgacgagacagtcaaccgatggacctgatcatcccagtaagaccagaactcctgccgggattccggccacgtaccggagggaacgcccagacagtccatgagcaaggtatactcgccatatgcgcgctgagcactggtgtagtccacacggccgtagacacgctggtagaaatcggtcgcagtcgcgtacagcgtcgccgccatccacagctgcagcggcgggtgctcagcgaatcgattcgagcggccgcctagcaggggcggcttaccatcctgcaggaggtcgatgaggactttgcgctcgtcgcgggtgccgaagaccagacaggagatgtagctgatattggcttggagagcgtcaataagctccgtggctagctctttgtggccgccgtggttggcgcctgcgtcgcggatgcccggcatggcagcttgtagtagtagcgtcgcaccggatcccgcgaagaggatgccctcctgcagcatttttgggaggacctctagttgctctagggcttggagccgggatgagacgttggtggtattgcttgcggtcgcatcggagccacgtgggtaatcttgggatttctcatccactggggagacgggaggtgtagggaaagacatggttagagagttgtcgacagttgtcaatgaagctatctgtgagtatatgatcccattaatattgaaatattccaatgcttccccagaaatcccccgcaaaaccccgaaaatgctccaacgactaaagcgttgatcatctcggcccatgtgaatagtgtcgtctttcttagaataagccgcggctggcagcagatcgccatctcctgaagcgctgatccctcccctcttctgcgttattcaccaaagaaagcaatcctgctccgacgaggagcccgctttgttcctttttgtctttttgtcttttttttcttacccacggggtcccaccggtgcatggagaggagacgaagtccgggggtgctttgcgctaaaatacatatacgcagaaccttccccttccaaggtcaattgaaattgtgcgatcatgggtaaaaatacagatacaccagcatatctgacttcagatgatgccaaatacactctgggtattcatcgtggcccgttgatatccaagggcgatgaaggcgcccagctcgcacatgtcgagtcagccgggggtctgtcattagagacgaggaagctgaagcgcagtgagaagttccaacgccattggaagcgattctggtgtctgcatcttttagtgactgtcatcttcctggcgattttcctacctgtcttgtgagttgcaagtcctcctgcgaataccaaacaaatactaattgcaatcagtttcctggttgccattccagccatctcacaaatggtcgtcaacaagtccgacctagtattggtcaatgccgcagtgttaaatccacgaccggacaagatccaattgacgctgttgtcggcattggacctcaaaatcgcactgccagtgcgcattgatccgatcacgttagagctgttcgtgcgtgataccggagcagagaatgcctggggccaggctgatatcgacggcaaagtcgtcaaaggcaacaccacgctaggcgtgaccaaggtccagacgccactgaccaatttgaccacctgggaggagtacgtgcacaatgtcgtgtttgagaaggagactgcgctgtcagtcaggggcgtaaccaattcatacttgggtgtgctcaagtccaaggtcactatggacaagaatataatgtcgccaggtaagcgaagaaaaataaatcaccctagaagtgaatctaaccccattagtgctggacaaattcaaaggattcagtatctccaacagcgggctcgttccagcccgcaaagacggcacaaacctaatcgggaatgtctcactccccaacccgtccgtattgactctcgatattggcacgctcgtcctcgacgtgaagagcggcgacctcgtcattggaaatgccaccgtcaaagacgtcactatcaaaccaggcgacaatgtcttccctctaaccggaatcctcgacatacacacaatgatcgagcacctcggagaaatactcgcgtcgcagacaaaggccctaacaaccggaaacttatccttggatacagtaacccgaaccgtcacctggaacggcacgctggtgccatattacaccaatgtaatgaaacagctaacgctgacggccaacgtgccaatcgccgatcttgttaagaacacagttcagaatctgcttagcggcaatgaaagcctcaccgacattctcagctcagcgggtgacacaagcaacttgctcggcaacctcacgagcagcaatggtgacagcgatacctccgagctcgcctctaagatgaagacgagtattgctgtgcgcgatattttccataacacgcacccggttaaacgggatctaatcatcaactcgctggctgggatgtacaagaagctgtgagctgccgatcctatttcatttggatttttcctatttttcctatttttcctatttttcttttcggcatttgctttttctttttcttgtcgaaagggtctccggttctgggttctgtgtacatggttgcgcgatgcttactgatgcttatatgatacttgattcccctttgggttgtggcagtggtctttcatctcgaatggcgttgtgggagtgtattgttgtctttctctcttgagacataaagaggggtcttaaagatcttgtttttcctgtcgactccatttctgaggcagtgcatcggctctgtatactccgtacatggctgcctgttcgggctcgggtcggtgcagatgataatacatgaattataaatcaaatgacgatataaatagatggtccttgtgtcgttagacttgcatattgtttcactgcaatgggcagtcagcttgacaaaagcaccgagcaggttgccaattaacttatccgaaaagctgtaggtcttttagttgctgaattgaatgtattagaatactaatgggtccactctgtagacgtcaacctcagacgagattccagttctggaaaatcttatagaatggagcacatatgcatctatggccgtggttccggatccagggcccaattgactgccagtcatgttcgatgataaatcataaacgatgtttgctgcccaaggcgtcctggatacccgagttgaccgagtcgtcgtcttgtttagtgctgaccacctcgtatactaagtttactctgtgctgatttaaattttaacttggttttgttaacattgagtgtgggtattgacctatcgtcttgtacagataatcatacctgaccggttgaatcatggaacaagccccttccaatatggatcccttatcccacgtaggtagtacccgcgtctgatacccaggaagaatggtggtgcctcttccaccaaattgcgcgacggaaaatacggaggcggtggcttcagcgtctgtgggaacagttcccgaggagcccagtgatctgcgggagaggtagcagtaggaagaggcgtagtaataggaagttgaaaattaggatcaaagctaatgaggacaagagcttgttgattagggggaagacccggggcgtcaatcgagtatataatcgaacagtcgtctgcaatgcttttcacagatccagtacgcgggcctggacagagcaattgctgtaatgcaggcggagcgtcttctggaggccacatgtacacgccacgacattcaaagcgttcctcggaaccttcaacaggataaccatcttggtccacctgggtgggctggaacagttggttgcgaggtccctcaattccctcctcgtcaataggacatttgcgcttgcgcgacaccgtacgcaaccgaatccgatctcgagaccgtagattatcaccgacgggatcgttaacaatatccacaaagctggatgcaccgagatggtaactcttgtgtttggtgcgagctgcgatgaactcctgccgcatggtagagccgggctcatactcggcatggtaatgccgccgcaacctcttcgcaggtcggtcattgtaggggtgctctgcatccatagatacccagcaaggactttgtgtggcgccttctacaagaggcgctagagcttcttctggtgtgggaagtggctgtgtgtagtatgtacggtggttttcactcttgccatcacgccactcacggcgacattcaagtatgactgggcggccagtcctctcatccgtgcggattgaaagatcagtccacatctcattgatcgggccttcttgatgctctcggcgccacaggcgacctttccatctgcggtattcatcgcgaggggcttggcagaaccaatagtagaaagaggagtgcacatcatcgtctgcggcgtcctgcgtcgaaactgcatagagatattcaccatgcatctcaaaacacagtgtttggccaagatcgccagcgaccactcggtcgagttcgaagttaataccttcatacgattggagatccacaccagtaatagaccacgaaccctccgcggaaccatcgccggccataaatatgccataccagatgtaggttccgcagtgtcgcacaaaaaccggtgcggatgctgggattggctcatggagtaggaaccggctccgtccctggtggtattcgcgccacgccatgttgaccacgagcaatgcgtcctcggtcgcgttcgcatcggccactcggaagatgagaatgtcatcgctgtagctcaatagcgtaacccggtcctctgcacccggctccacgggaccggtttctagcagccgtgggatcgcatcacggaggtccatgacacgctccctgaataccgtaccatgtaaatacagcagacggatccaatggtcagaacggtaacataagtggccttggttgtaaagaaactcggacccatagcctacgcagaccgccgagtacggatttgctgttgccacagcctcgtggatcgcaagccgatgcccaacagcctggcgaaaaccggactgggccgcgagggcagcctgaccttctttgctgtagcgaaaaacattctgtaagccgggatcagccttgtaattcaagcgaggggctggcttggcttacctcgacggttttgcgggcgatctgttcacttcgcgacagatgatatagggcacggctagtgcgactaaggtttataaaatcacagtcgtccagcagcgttgcgatctggtagaacacatcatatgaaagagtgtccagactcatggctataagtgccaaatagtctgttgatttaaatagtctcaagggagtgtctcagacagaagggcaacagccataggaaaggaaaaataaaacaaagtccatatcgaaggtcataaggaaagaacgagatttatgtcagagagaaagaagataggaggaaagaggaggtgagaggctcaagtcatgaatgtcctaaagaggaaagaacaggcccacatgaaaaccatggaaccccttcgtacaaaaccttggatgctggcagagcctcaactagaccaaaaatggaatgacaaaccaattgtaaccttggagccttcctcgaaaaacttatcgccatggcttttacagtaagaaagcaaaagcagacatccccggatcacggagcacgcgatttggcaggatcggatccttgaggctctgtttttgttttcagattacgactaacatctccgaaagaatgcggctcatccgtctccattaggactaagcaagtgccggatctctcgtaacacgggttaggtggggttcgcaggtagccaagaatcttcagtccttggtcctatcggatctccggtgtgtgtgacctccgtgaataaagcgccctggtaatatccatggatgggctatacgtatacttcgtaagtgtttcaaggtactgtaacttgacgcatcctacatcatctagttatgtaattgtacagcgccccattaaaaacgtctctcgcaagccacttgggggcaaaactagtctcacgtacgcattatgcatgctaagttgccccggtctattcttgggcccctaccccgtagttcttcctacttctactcctaaggtttcctattgatgtcggaatcaggtgacgacatgcatagtcacatgatggccgaaaagtcgctgcctaacttacagcctgaggctgctttgtttcatgattacacattagattacgcagtacaacgcatggtacgcattactagcgaggagggccattactggagtcattcaagcgaattaaagtgatttacctgcagccctaccggtggatcccatatctaccaatctccaaggagtgttctttgtatagtccgtacatgaattgcccggggcacccaacacttgtcccaatgggaaagtgaaaggtcccatctgcgtgtgcgtgacccacccggccagccggattgcttttaaactgttcaacttcttcgtcttccttttcctctcttccatcaggagattataggtcgcatctttgaagagatgaattatccaccgaggggtccacctccaggacaagggcctcccccatggggaggatatcaacaacctccccaatggcagcctccgcctcggccgtatcctcctcagccctacggtcatcgaccccaatcatcttattcgggtcctggtcattccccctacccatcagcttatccccaatctcaacctcagtatccgcaccctcagtatcctcagcctcaatatcctcagtatcctcctcaatccccgccatacggccccactccacctcctcgtcctccctcacaccagcatactctgagtgccccgcagaatggtaaacttctatgccaagaacccttggcggcgtcactaaccgttgacaggatatcctcgtccaaactctccgaatctgcccccaaccccaccccataattctcagcaatttggtggaggtgctccctcgaactacaggttccagtactcggattgtaccggtcgccgccgggctttgttgatcgggatcaactacgcagggcagcccaatgcactcaaaggctgtatcaatgatgttgctaacatgtccaacttcttgactcggaggtacgggtacaagcgtgaggacatggtcattctcaccgatgaccagcggaatccgatgagcatccccaccaaggcgaacataatacgcgccatgcagtggctcgtcaaggacgcccagcctaacgattcgttgttcatccacttctcgggccacggaggtcgtactcccgatctggatggagatgaggacgatggattcgacgatgtcatctacccattggactaccgcgtcgctggccacattgtggacgatgacatgcatgccattatggtgcgtccactgcggcctggcgtgcgattgacggcgatcttcgattcatgccactcgggcactgcattggatctgccgtatgtctactcgacgcagggcgttctcaaggagcccaatctggccaaggaggccgcccaggacttgttcagtgcattcacttcatatggacagggtgatttctctggtgtcgcttccaccgccatcgggttcatcaaaaaggcagtcatcggcgaatcggcccgtgagcgcaccatcacgaccaagacctctccagccgacgttgtgatgttttcagggtccaaggacacacagacctcgtaggtggcgttttaaaattaaaattaaggcagataagaatccaaactaacctcgaaacagggcggatacattccaggacggacaggcgcgtggtgcattgagttgggcgtttataaaatcactggaacagtggccccagcagagttacctgcagctgctgaacacgattcgaaatgagctcgagggcaaatactcgcagaagccgcaactcagctgcagccatccccttggtaagttatttttcagcggtgtgacccgcgcccctggctgactggagatcgacagaccccaaccttcgctttgtgatgtaaccggggatttttcatccgagctgttatgacagacatgatcgacatgtagcaaatgaatcagctgagacttccgactcccgagttccggtgcggggaagagcctgtaaccttggcaattgtgtagtattgtagataatatgtactacctgatactgcggaaaagaatcgaaaagaatcgaacatgatggaaaatatatactagatgtattgtacggagtctaatatagtgcaataatagcacggaatacggtgcgcccgcatctcccaaacgtgtgggctcgtttgtggctgtggttctctctcctgtgcctcagctcggtggatctgcaaactcaatgggaaagattttttttttctcaagagcaaacccaaccaacatacatagacaatataggtaactattcctcccaacccttccctatctaccagtaactgtcccatcccaatgcctgatgtctaatgtctcacgtcaaggttcaagcgtttctatagaaaagtatagaaccatggcgccattacccccctgagcggggatcgggccaatcacaagcccgcaatccccagttcccggtgggaaccgcggacgcactggctctgccccttgggaaatgtcgcaactcgctatttttcgctttcgttgcgtatgagcgacgtgttggaatgggatacttcacgcaacgacctggagaatgtccgttgcacacggtcttacgaatatcgtggctttggtcagccgcgtcacattgggatcgaagacaacgtgttgccagatctttgagacatgatctgatcaccccacggcggttttttccacatggatggaccgattgtactgtttatacaacacagtatacaacacagtatacttcctatagttgtatgagcaaatactatgtactcctatactcctagtcaagacctactcgaatctcatattcagcctaataatataaaaacaaaacaaaaattacaagtcatctaagtgttaccgaactaaaatgttgatgtctctctgatccactttcggtctttttcagaattccatctgaataccctttctgctcgcattttccctcttcctcttatttccctcttcctgcaacatcacagccttctgccgccatgttgttaccgtctacgaacagttcctatacttccagcgtctcctccgagccgcatctctccccataccaacatccgccgacatccactttttcattgaactcccgccgaaccccaatgactgtgaagtaccctcgcttctactcgtcccccatggaccaagaaaccgacgccaccccggtacaaatctacggcctggagcagcgagaaccctccatccacaggggatcccccaaactgctcagtcgagtctcgcacgtcctagacgacatccgcgaagacctcgtgatagacgctcaccaaaccacggagaagctcaagcggtactcaaccatcaaccacgacggacacggtctcagtgctcccccgactcgcccagagggcccgatgacatcccacgggcccccgcggtcgcggccaatgtccatcatctccttcgacaactggtcctcgccgactgggagaatgagccggctgtcccgccggttctcggtcttctcttctcggaacaagctcaatcgctccaaggaagctagcatatcttcgccaaatctgatcggttcctcgactcagtacgaataactggaaattatcatatatgatcatcatcaaaagagagcaatttcagtccccatcggtgatcatggggtcgacgctcgagccgtcgtacattgcacggctattcatacatacatgcgcaaggggtgttccggtatactcattcttcgtttttgcacttgatgttttttttttttttttctgcgtcaatttttgcggtgggcagcgatcattttcattttattaatatcgctagttcatgtgttgaggttatgtgttgtttctacttccctctgcttgacttgcgcatagctcggtgtttgggattttgatttttggccttggaatatcgattcgcatttccccccccccccgtccccttgacatatcagaataatatactgagtatcatatacagaaccccttgaaaactaaccctgccctcgagttcaataaaatataacgctaattgcgccaccatgcatttcccaagctaagcaattgccggtagactaacgtcagcccgttagtcaatgcctaaaaataaaggctggaaaaagtccgagatgacgtattttaaatccgaccgctctctggatctaaaacaaacgcctcgaactcgcactcgcactcgcatcgcataacgtacgtacccgggttttctgcaggctgtggagaataccgcagatgcgatgccatgccaagatgggaagaatgtcctggacgatgcatggtagattggctgctgggtttggaatggtcctgcattgtcgtttggggctaaaagaagaatggccctaatgacaactagcgttggacagggatgcaggaatagactgggatcaaaattaaggagtaagtagatctctgcgtctggggtgggttcgtcgctatttactttcgatactgtgtcctttgggtgtgcattgatttctgaaacaactagctgctattattccatacatcctctccactgtactactcaatgcctatcatcaactgtctaatactcactgcccctctccctcgatccattccacgtgctcgcgctctgctgtctcgacaggcataacccccttactaacagccattctctcgaactcctcgtcttcacggtcaatgtatttctgcgggcgttttcgacaaatggtatccggatctccagtcacaatcaacgatgggttggtgcggtaataggcatcaagatcctcaagactccggttggctacaataacagtgagtaagaggataacatgcgatagctctgaacgtaacagtctccgggtagaagaagtagaggataggcaggaaaacagcattagacaccatccagacaatccaaaacttccacccaatattctaaatcccgatcggggtgatctccacaacgatgaagttcgtaatcctatatttgtcaaaacacagccaacgatgtaaccacaccacccaggcaccccgtcggtataacatcaattttctcaacctttgggcgcttggcacggttaacaccaccaacccttgaaaaataggcagagcttttcatttaacgtaatcggtaagcgagccggccatgtaagccagccggccacccaacccaaaaggcgtccatgatttagcacttagttagttcaaccacccactatgccaccaattcgctcccaatcctctagaaattcaatagagtaagagggtaggattctcttagctatttaggcttttaaaaataaagaaatctcttcaattcgcgaagtagcgcgccgttttaatgtaccacgtttaacgcttcaagaccgattatagggccactaaaatcgcgcgatttctcgcgtaaatttatctaaatcaacagaaattaaggaggaatctcttgaaacatagattctttctatagatctacgtgttttgctctccgagttagtaaacccgcaatatgaacaaatgatttcgtgccttctgctcttgatgaaaaaaatatccttggggagaaacctgggagctattgaaaacggatgtatataaatgtgtaacgtaattctcatcttttggtacattaagcgcatttggacaggcaggctggttcttcgtacagctattctcgcacaaaagagtgccgagatcaaatcaggggttgctatcgacactcaacgcatctgggtggttgatggcttataccgtaatatcgatgaaatcgtagaatctagactccaaagcggaactcccgcaccttcttctggtagtagaaagatgctaacaacccagtggcaccgagagccaaaggcatagcagccctagcctttgtcttaataatcctagggatcgcagagctcagaaggaggatgctgtttcccagggcgagctcagtgccgtagtccttgttctctttgatcaaataacctggtaacatggtcagcttcggaatattctggcacacccatggtacttaccggaataggcatatgatagaccgagtccaacaccggcaatcaaagaaggcgctgaccgcgttcgtagaaacccaacggtacctccgataggcactactttggtcagaaatatagcaattggtctcgttgcacggacttacgaagagctgcaagggtaaatgaaggatgttcggccatgatagttaagtacttaaaacaatgtagttgaagggtctgatgcttcaaaatttagaaagctctcaagtgccaggggcgcgtagatcccgctggggccgagctccgatgagtcagcggaacacaggacctgggaccatcgtagagaatcattttgttaacgacagccatttgttattgtcaattctctaaatccatccagaatttatggattaatcatacagtagcatcatcattcactcttatatactgaccgtaacattaatgattttatactttgattcagcttgggatctaggaaggagctgttgtttcatgatctccatcaccacgccactcgcgtatgtcacttgcctcctttacattctataatccattccattcctgtaacaagcacatacgaccatagggtgtggaaaacagggcttcccgtccgctcagccgtacttaagcnnnnnnnnnnnnnnnnnnnnnnnnnnnnnnnnnnnnnnnnnnnnnnnnnnnnnnnnnnnnnnnnnnnnnnnnnnnnnnnnnnnnnnnnnnnnnnnnnnnnnnnnnnnnnnnnnnnnnnnnnnnnnnnnnnnnnnnnnnnnnnnnnnnnnnnnnnnnnnnnnnnnnnnnnnnnnnnnnnnnnnnnnnnnnnnnnnnnnnnnnnnnnnnnnnnnnnnnnnnnnnnnnnnnnnnnnnnnnnnnnnnnnnnnnnnnnnnnnnnnnnnnnnnnnnnnnnnnnnnnnnnnnnnnnnnnnnnnnnnnnnnnnnnnnnnnnnnnnnnnnnnnnnnnnnnnnnnnnnnnnnnnnnnnnnnnnnnnnnnnnnnnnnnnnnnnnnnnnnnnnnnnnnnnnnnnnnnnnnnnnnnnnnnnnnnnnnnnnnnnnnnnnnnnnnnnnnnnnnnnnnnnnnnnnnnnnnnnnnnnnnnnnnnnnnnnnnnnnnnnnnnnnnnnnnnnnnnnnnnnnnnnnnnnnnnnnnnnnnnnnnnnnnnnnnnnnnnnnnnnnnnnnnnnnnnnnnnnnnnnnnnnnnnnnnnnnnnnnnnnnnnnnnnnnnnnnnnnnnnnnnnnnnnnnnnnnnnnnnnnnnnnnnnnnnnnnnnnnnnnnnnnnnnnnnnnnnnnnnnnnnnnnnnnnnnnnnnnnnnnnnnnnnnnnnnnnnnnnnnnnnnnnnnnnnnnnnnnnnnnnncgccggtgagttagtagttgggtgggtgaccaccagcgaatcctcactgttgtatgtttttttcgaatgctatttatatagcaatagtcattataatagaacggtaaaatgcggtgcccgtttgagttgctgcagcgtcattcgcttcagggttgcgccgtaggttgtagcaaacacaaacagtttgccctgacgcaatcaatttcaacttttttgtgcttactttatgttatggtgccgcaagtctccctaatcgctgatgtctgctgcaatagtgcctttgacctttgaagtgcctcgagcgtatggttataaagtatgagagtatatgacccttctcgatcaaatctctattctttacaaaaagaagcaattcatgccaaacattaaatcattcttttgatattatagttataattcgacaatcatggaaaatcttcccactactgcgaagacacacattgtccctgccgcccaaggctacgtatttgaggttatgaaaggggagcgattccgcattgttgacatacacggtctccaaattgttgattttatggcttgggttaacgagccaggcctaaaagagcatgttcggatgtcttacaccaggttccgactgcaaggtgtcagtcccgacattggggagcatctccgcaccaacctcgacgctcctgctctgactatcattgccgatacctgcaaagtccacgatatgacattcatgccctgtttcccggagatctatgctgaatgcggtctggaaggtcatcggtcctgcgcaatgaatatcactgaggccatggagccatatggtattacttcacggctcgagcttcctgacccgttcaaccttttcatgaattcgcccaattacactttgaagcctatcagcaacagcaagcccggagactaaattgagatggaggcgctgaaggacttgattatcgggatttcgtgctgcccttatgatcttgtgagtcttctgtgatcaaccgagcgtgaagctcaagtatactgacctctcattttttcagggaacctacaatggagacagacgacccccatcgcgattattacagggttgtaatgagtaccggtgcagatcacccaccgagtggaagtataggctctcattggctacatcatcatatccaagagccccatatcatactaagttgatcctacgcaatgtgacaataatcccgaaataattgactggtgtaacctgtttcatctgcatccctcgtagaaatcagtctaaacaaatataacgcgcctataatccacacaaaagccttaccataatcaatgttttacttaatccagcgtccttagaataaaaagcccacaattgcagaagtccggaatctttctaacatttttaacgtcgtctaatagcagtaaaatctcgtagcttatagacatataaagagtagagaaataactgtctagcactttttatgtctctataagtgaactatatggaaatctttccacttatatatacaatttcctgctcttcttactctcgtcttttaattttagtaaggtcgtggtacaatatataaatgtcatgaagatagcatagccgaagatcaatatcccgataactgagaatctgaacacctagttaattaaacgtggtattagagaagttttaatctaaaatcttgattcaagatgtcttttttgaacctctgttttaaagtcttttcagatgctcttttattattttttggatacctttacgtatggctttttgatggatttttaaatgcctacaaatatctgtttagaaaaccagctgtaaatcaattaacattaaatacatgtttcaagtgacctgtttccaagcagaaacgttcttcttcacaaactcctcccacgtagtaggcttactatcgagaaggctcaggctgggctcgaggggttctccgaggtagtagccaggctcctccacaaatagctggttctcaaggtactcatcagcgatagcagcaggaagggaggccttgtattgatcggaagagacttggacgaagacagccttcttgccagtcaccttggagaaggtgtccacgatctcctcgggggtgtagtacttcgcagcggccaatatctgcttgtccttcagctggccagcgtgctttatggcagctctcacgaagagacctaggggatatgtgagttaatgcgtataaaaaaaaaagaggggagctaggagaggtctcacctgtatcctgggccgcatcgaagagagggaattgagcctgctttcccaccgggtagaaaagctggtatgacccatcctcagcacgactgagcatctgggtgaagttgctcatgtagtaaccgggaaggacaaagctgcatccaacgcccgaagcacgaatatacttctcgatactggctttgctatcgaaatgaggcacatggctcaggcgacccttggtctcctccgtaacatggtggagagatgagaatatcaggtgagaaacaccaatagccttggagacatcggtcacattcttgccctgggagaactcaatgtcggggttcatagtctcccagtagttggtgacgaggaacacagtgtgggatcccttcaacgccgcagtgagagtgtcgactgagcccagatcggcctatttgaatgttagtctctctacctatgataattattcacaaagacaacaaggaagtgaaaagagtaaaacgaaataagaaatcccatcttaccgagacaacatcgacaccgcgcttggccaggtcctgtgccgatttcttggtggtgtcgcgggtgataccccggatcttgaattccttcgagagctgggtatcggcgagaatggcgtcgatgacggaaccaccctggtttccggtggcgccaaaaatagtgatcaacttagacatggtggataactgatggatttagcttggagaacagaggaatttgggcaataacacagtaatctattctcgttagaatattgtatctcagttgcgtctggtgttcttatttaccgtttccaaggctataagggatgttagaagatagtaaagtggtttgaagagaaggcttaccctaagacgatccggccaacgaacatctgcgccagactgaacgaactcgcctgaagaatacctcccactgccatgatcgtagtccccagcaggatagctttcttccggcccagatgctcaccaatagtgaatgcgacaagcgctccgaagaaacagccaatatcatatatcgccgtcaccgtggatagcatcgttgtcttcgtaggcccgaccagatcgtggacttcaagaaaatcctgtgtgatcacaacgccgcatgtattgaaatcagaggttaattcaagattgcatagtctccagagcactcactgaagactccttggtcgtaaccgaacaaggtcatatcggttgcgcatgccacctaagacaaaacaagtcaaattgattccgatcaaacactacagatacctctagtcataccgtaatccagaaggtcagccatccccctgttaacccgaagtagggctttttcttctgcgcgacggtagtcatatcgtaactaactataaagaatcaaaggaatggaatctccacaccgtgcctacgtagaagtgaaacttcatcctttatatactagtctcgaattaattatgtatgtcttggatgtatgcaagggatgtgtttacaaagagatccggggaatgatctcgggtccgccccgaagtccgggggaaaatgcggggagaacttccgctggaataaggccgttaacccaaaagggtatcccgtgggacctgatcgtctgggatttataccgcatctagtagattagattcgttcggattcaaggaaagattcttacgtcactgatcgtctggggggtatgtcatttcggcattggaggaatatcgtctgctataagtgccttttatggactaatgaggtacaatcctaggaaaagcacgtaatatgcagatcaagtcgactgaaagaggtatacatagatagtgtatagtggaaccactttttgtgtacgcagaccttatgtaggtctccgcctccgctcctaatccctgatgtccatggcacgtatttttgaacagatgatattgcatgcctcgtgagatggtataggggccatgagccagatgaaaaattgaagcaccaggaaacaccgtctgaaaacaacaccagaatcaacctgcaaagcatccgacggaatgcaaacttgaacgcaacaagcttctgaacaagaaggggcgtccgcaaaaattcaaaataaaccaaatccacgtataatacgctataataatcccaacccgacgtgtctagaacatggagccagtccatgcagctcggagacgcacgtgcggcacggcatccccatctccgacccgggtcctgccctatctataaacctcaatcacagagtcacgctctcaagatcacgcatgacaatacccatctgagcgcgcttggctgcctcagcgacaagactgaaatcctgcaggaagggcgctgtggcagttgggcccccgagaccgtgtatctgatgggggtaggcatcggatgtggacgccgaagtgggggctgcatatgcatgggtgttggctgcgggggcgatgggcaggttactcgagttggatgtgttgccgaatgcctgtgacaagggttgcatgggaggggcggaggtttgcggggaacaggcagattggagcgaggatgaagaaaacatctgcctggttgcattcgatgcgacttctagggtattttgattttgagactggcctgccatggtggactggccggttgaatggttgagtgttgaggtaggttgagtttcttgagggttgtagactgttcgcatagtcgagtccatgacgtgactaaaacggtccgatcttgcaagtgcaggaagaataggccgcactgaacgtggacttgggtatattgatagaacggggagagggtttgttgctatggacaaagatgcgatgggagattaagaatggaaaagggagcagagtggcaaggaaattgaagccgcttcgaggatgcaaattgcaggaagctaagacgaatttagatggcgggggcaatttccactaggcagacgatggacgaatggccgaatgatagagacagaagtgatggaagagaaagacttgctgtctaaaccttgcaagacagagatttacacagaatccctcaggggtgcatatgaccttgtgaaggccaactgcagtttttcctttaatcccgagatttgtccgaggtggggtattgtaccgtattgtgacggtatctccacgcttttctccacacaatattacgataccatcacgtgggaatatacacgtgacgtttaattggaacagggtaactactacagttctctgtagagttgtagagtatgttagaacatcagacaatccaaagaacaatgcacatacacatatgaaaaggcccgaatatcgaatcccgagcccgagagaccccgtaatcagcccactaaaccttggaatacagatagtgcctgaggcaacactccgtaccgaggtctacgataagaaattgataactgatactgatattttttcccctccaagcactaagccatatactaccatggccgacgactttgattcagggaacctattccaggacccggaagggtactatcccgaagaggagccgcccacattcgccgagcacaccatgctatcaggccagaaagtgcgcgtccgtctcgtgggcagccaccccctctatgtatgatatcaattgacacgaccagctgaggtgcctacttacagaccttgacagggaaatctgctatggaacgctggacgaaccagctcccattacattgaggagcacaccgaggatctcatccgaaacaaggatgtcctcgaaatcggtgccgcggccggcgttcccagcatcgtgagcgccattcagggcgcccgcaccgtggtattgaccgactacccggatccagatctagttcaaaacatgaagcacaacgcagagttggcggccagtgccattcccgcgagggaagacggaaagccccgcctccatgtcgatggctacaaatggggcagcgatgtgagcccgctgcgagcgtatctgcctcctgctgccgatggctctccgtcgttgtttgacgtcttgatcatggcggatgtggtatacagccaccgcgagcacccgaatctgatcaagactatgcagcagaccttgaagaaggacccgaaatctgttgctctggttatcttcaccccctaccagccctggctgttgcccaagactgagcaattcttcccgttggccgaggcgagcggtttcactgtcaccaagatctttgagaaggtgatggatacggtgctttttgagaaagaccctggcgtaagtcattttgaggattctcctttggattatgaccgtgtactgactcttcacaggatgaaaggctccgaaaaaccgtgttcggatatgagatccgatgggcgcaggatcaactggaggattcatccaaagctgtttgagtcgttggtttgatacttcggcctttttggaacgatgacatgattacatgacaaaagttcgatagatttgtatacattgggatagagatatgttctagaagatatttaccatctctaaatttgcgccaaaagcttcatgttcatggggtcatcgccgtaagtgagcaagccctcgagcttatgtaataatcaggtgattctcagtgagaaagccatctcgcggcctaattcggtgtatatgtagctttgcatcgtgtccgtactagagtgctcagaaatttgcaatttacaatagcctgccaataatattctgcatgataatgcaaatacaagttcttcaagggtggaaggtcgtggatatagatgcgggtcacatgccacaacccccgcaatgataaaaaaagttgtttgaacaaacgcacaagtcaacgatgccggtatgtcgacaaaccttatatattctacaatcaaatctaacatctacacactcagctcgttattttaacggggtacccgtgctccggtctcacctaccgcgccaatcaactcgcatctctgatcgagaaacaccaagatgaagtattcgcagcagccgaagcaggcgcgcaggtctccttgaagtcccgatacaaggtgcacgtggtcgcttcacacgattcctctcatccacggattgtctacgaccatgcccgcaccgagaaggaggcacgcggcgtcgcctacgcgcgaaccaaacgcgtgctcaagcgggacagcatcgtcatcctcgatggaatgaattatatcaaaggatggagataccagctgtggtgtgaggctaaagcggcgcaaacgacatgctgcgtggtacgcgatcggaagatactaaatgaatcgcgacacccaatggctgacaagtctgctccaggttcacgtcgggacacccgtcgaccagtgcgtcgccaacaatgacgcccgactacgccgagatgccagcaagcaagaaacaaaccccaatacatccgatgcgcagacctccgaatcccaagatacccccgcacccgactcaacatccaccgaggacaacgaggaagcctacccacccgaactcctcaacaacctcatcttccgctacgaggaaccaagcacccacagccgctgggataagccgctcttcacagtcccctgggcggacgccgaacccccggtttcagacatcttcgaagccctgaccggcgtcgtcctcccctcaaccgaagcacccaccgaaacccccaccgcaagcctaatcgacgccctcaaatccaccaccatctccgatgtcgccagcacagcaaccggcacacgagccggcggccgtagcgggatctccacccgcgcccgaatcatcccgcaccaagccactgtgcaagcagcggcaacggactcgaacgcaatgtacgcaatggagaagcggacatcggcggtcgtgactgcgatccgcaatttcacgcagacatacccgtcggcgcaggtagctcttgcgcagagcagtcgcagagatacaatcgccattgacgtgcccgagactactattcccatacttattccggctcatgttgccatggcgggaacaacggatgagctcgctgctgctggggggattctggcgttgccgcggctgcagaggctgcggaggcagtggattagcttgcatagatcgtatgtcggtcggggtcatggttcattggcggcggatcagattggagatgcgtttgtgcggtttctcaatgctgagttctcgggtgcggttacggaggctgcggaagaatagatgcttgtgcggtcttgttcattatgaaaagtcagttggtgtttatgagaaaacgaggttacgacttggatacccttcagatctacagctgtacgtggtttaaaaggattgcaaagtaaaaggtcatttgaaagaagatacaagaacgcaagactatctatcaacatgcataaatcagaatccaaccaattgttggacaatacatggctatatctctctttactgtcattcttcttccccttgagacactgtatcccgctttgctgtttcctccgcataagtttcgggtcttttgtgtcattggggatgattttatccatagatctggaattcaggccaagaagctcagaagcccttggtacgaatccagatccccatgtgaggagcagcctgcgatccggagcggatcaacaagctctcgagcgtggggtggagtaccacgcgtcctatccagttcctggccgtaatatccatatctggaatcgaatcgtccttgtccgatgatgggatcaaacgggacaatccttcggccgaagtccattgtgtactcgcgagcgatcgcaccgggttctccatgtaaaagtgcctagccagcaagcacagtctagccggagtaaaaaaggaaatcaagaaaaaaatcctccgtgaagtttgttcgtgtcgttcaaaagaaaaccgctgttctcctccaggacggagggcctacagctccttaacccttcaaggcaatccattgggcatgtgggaaacagcctggctggcctcaatctggcggtagttcaagcccaaagtgaacagttcctggaaaccggcattgaccttctcgtgcataatggtatccttaggggaaatggcactcagctcctcgagcagacgcgagcggcacttgaagaagttctgctcggcgttctggaggtgctggctgaggctagcggaagcttggctggccttgatggagctagcctgggagttgacggaccgagtgcgcttcatggtgggcgccggggtggcaccggtgactcttctcttgcggccagtgggttccttcttcttgatctgaccagcaccgggcgaggtctcgggcgagctgtggcgctcggaagtggcatagtcgtgcacgcgacgcatgtggtcgtaaaggttccatctccgtgggaatccatttcctggaacggcgcgttcacagccctcccacaggcagaggtgggggttatctccatggccatgtagtccgtgagcctcgcgctcgtggcggaacagacaggcgttggaagagaagcgcagctgggcatcgatgcaggcggggaccttgcagcggtatggcttcagatgggaatccaagtacttgctgttagttgatattggttagctgggttcattgcaccaaagatttcatcacgggaggacttgctggtaagcgcatttttgcgtggtgggtgggtggctgcagggtttctctccagtggcaaatgggcagtagtattttccatcgctgtgggtggacatggaataatactggtgctctcgcgggttgcgagcctcaacaccttccttggatcttgggcgggctggctctctcactgggagggtagggaagaaatcgggctcagtcttgatttgttgctgggaaacagatgacaacgccgaacgtcgggatggctttgagggtctgatggtcctacgatattgtggttaggtttccgatcacatttgtattctgggtgtacctctttctgacactcacctgtggggatctctgtcgttgatagaggagctggggaacaagggctccgcagggttgagtccatgggtcgttccaatgggcgatgtggtgaaatctccgaggagtgcatcatcgggggccatgaatgaagagtatcccgcgtgtgagcaagaaatatcattgctagcgtcggtcagtggtggggagaccggggcggtctggtaaagacctgacgcgtattccatggtggttcctgggtaatgggtatcatgcatcattggggtccactctgggcctgtgatatagtggccgtcctcggtactgtgagagctgtgcccgatggaaagagcatcatctggggtgccgtttccgacacagacatcattttcaacagaagagaaatccaggaaggagttataaagatcccgggtcatttcatggtccatgtcagggactgctgggaagtccatgcctgggtacataatatcatttggtccgaccgtgggggtcatcagctgctgtgatagagagaaagaaagcatgtgaacctcggatgagtctgattttgacatggcctggtcaagggagtcttggcggtttagtgtccagtctttcatgtcctgtggatttccatgggctgtacggatacttgagcacaacgaggagctgtcatggctcgaaatttcatcatcctggattgatctcgaggccatatttgagattcctgaaaccatggaggtatgcatggactgtgagatagagacacgatcagagtcgctggtgttccttggagacattgtgtgtgtggatgtgtgagggaaaaacactgtaaaccaggagttagtatctactactcctcatcgaatgaaataaaaagcaaaaaaacagaacaaaaatgaacaaaaaacaacagctccatggtccagaagcgacgggatacctagtgagagtcagtaaagagactaggccgcgtcacgatttagttatacgcaccgaagtcgtttgtatgggattgagatttccttggccgaccagggattatcgtaaggtcctggtcaatgtgtcgtgtctatgttcgggtccaggtctgttgtcaatccaagggagggctatgtggtgccagggcgagaaacattttcatggccggtgttactatttggttgaagcatcatcatccaggtgagtccaggtaagcaaaagaaaagtcgttcatttttggccaggtcagataggtacacaacggccaggttccatagagcaacggcctaagcagaattctaaagcggatgcttcgaaagaccataagtgtcagggagcaagcacattagcttgaaagattccttggttgattccttggggtcaaagtggttccattattgttgagagacggtggccatagtagtatcggatatccaggcaaagagtcatcaagtcattaagtggttcattccagtgttgtttccagaggcagtggggtccagggtatatcaaaatccgcactcaaactccggtcttagagcagaggcaatgtgaaaagcagaaacatccattggcagtagtccggtggtagtggaaatcaggcgatttgagagtgcaacattaaacacatctcaaagagattcactcagcaggtgctgaaggcaggtaggcaagtatcctgggcagtggttcctcaatggtcgccaaaattggcaaaaaaaaacaagtccgggtgtggtaggtctaaggtccttgggtcctgggcaataggttgtcgacatcctttggcaagcacggctgacaggtacaggtccagacaaagcagataaaaaaaaaaacaacgcataggagaaccaattgaaaagaaaaagtgacgggagctacctattgtgtttgtcgagaagtggcagactaaagagaagcctgggagataacaagaaaacaaatcctgtccgggaagtatgtggcagagagaaaatccttgtggcagtgattggatcaaaaaccagggagtcttaggttaagaaagaagttgtccttggtccagggactgagttgttgaagaggagtatatataagaatgatacacaaggtaatcaaggtagtcgaggtggtgatggtggtggttgtagaaaggggtactcagagttaaggaaggaagaagaagaagaaacagaatggaggaggggatcagcgggtttttagcacacaaaaaaatgaaagctcggacttgagagggtctgtgggccataaaacatggcgtgtgccagtctcgcatcatgcaggagacgagtgcgctgttggcaccgtcaaggccagtgctgtcgactggcggtgatggcatgtgcagatagggggggtggctcggttgactgagtggagggatatctactagcggtgagacgggctcggcgtcttagtgcttggcgagaagtatgattggtgacggccgaaggatgacggtgtaagacgaagtccgagttgagggatcggcaggttcgctcgcgtgttcgatgagatgtccaactcctgtttcacttcagggggatcgtatggaggagaggatcccacgtcagagggccacgggaagtatacctgcagcatgcttgtacagcggttgcgactcgaaatagtacaacatacgcacggagtacacggggtatacggagcagtgaagcaagaaataaatggtaaatgtaaattattccaatcaataaaactaagattactggacgacggcacggggcgagccagtctaccagacccacgttgggcagcaatgcagtcacttttctcctattttcgggtctttgttcagtcagccaagttcgaaagaagtatgagaaaaagatagacaaggttgacaggatcagaaaagtaaaaatggaatatgttttcgttcagcaatccgaagatctcaggtgaactatgctttaatattggttgttcatcacgaaaggcaaatgcccttgggaggcagtaaaagagtgcaaaatcaaaaaataatgataggcttacctgttagcgggatttgtcggaagaaggatgagttggcatgaaacaccaagtcatcacaggtcgtcgagggccgtgagggcagtctggactgtgattgacggagaaaagggaaaagaaaagaagaaaagttttttgtaggtggtcagatcacgtgatacgtgtacatttgtattgtttacactgtttgtctcgatttggagcaaacatccaccccatctgacaacggaggccttatccactctccacattgcattcctcggcatcatgaattggacaggcggccagctgcagcgtcatcacactcgctcaggcctgttgaccaaagctcagaagcagaatttcgctaggtcgagactccaaaagggcacggtcatttccccgccttcgccatttcgaaacttccctgatgaattcaagggctcgagcactagggaggatgagggggcagagacaaatgaaaatcagtcagtcaagaactgttggttgctttggctttgcttccgtcaatccgtgtgggcgtactcgtgctaacctgtgatcgtgctgattctagagttccggaagagtcggactcacatttgactggtcagacctcccatggtgatagtggccatggtgatagtggcttgaccggggtcaagcgccaactgctaaaagaacctgatgtggcagccgtgtctgctgcacgtccactcgaccttgcatttacatctgtcggggatgtcgagcgctttgggaagcgacgaaagctaaacgacaagaacagaaatcgacgggtagcagctaacaacaacgggtctgccttttttgaacggccgagatcccaacgaagaggcagaaatccatcctcggtgattgataccattgaagaagacatccagtttgagatagatggacggccagtggcgcaatccaacggcagctcgggggtggtcatgaacagcatgtcatcccagtcaatgctccttgaccatgaagaatctcctgttacggaacaggacatgggcaaagagaatctgacagctacttggattaccaatctctatccccgttcgcaattccctcagcgcggggctatgccgagcaggctataacgtcgatgctcgttttcatgcaagtcagatgaatgacacatgttctcggatatatcagataggtgttggggaagcacatgcttctcactccttgtgaaccctgtcttcccgggggcggcctgctagtcaaatcgtaggccaacagtatcatggaagtgccgttggattttccgaggtcagcaatatcgcctgacctagaaggaaaacgattacatagtcccataccaaccaaccaaccaaccaacaaatgaatgaatagaccaataagatccttgacccaaccaaatccactgcctaggccattctacatgcacgccgtaaatgcccatgctcctgtacatcgtaagttgcaccggttttccgttcctataggtctaaattgccgtattcggtcgtcacatgattggtagctgcctcccgaagcaacgtcatttccgtctccacaaccatctccaattatcaacggcgcgaagataccaagattaccagttctatcgttcaataatgcgttctatcacactgttggccgcactggccaccaacgcactctcaatcgcgctcccgtggcaatccgccccagatacaaccagcggaacccaactcccgctcgtgatctggcacggtctaggcgatgacttcgaacgcgaagggctggccgaagttgccaatctagccgaagccaccaaccccggcacctacgtgcacctcatccgcctagccaacgacggcagcggcgaccgctccgcagcctttttcggcaacgtaacagagcaaatcgcgctagtctgcgagcagctcgccacagacccaatcctcagcacagcgcccgccgtcaacgcactaggcttctcacagggcggccaattcctccgcgggtacatcgagcggtgcaacacgccgcccgtgcacaacctcgtcacattcggcagccagcacaacggcatctcggcgttcgagtcgtgcgcctacgacaattggttctgcaagggcgcggagcagctcctgcggtcgggacggtggacgagctttgcgcagtcgcgcgtcgtgccggcgcagtacttccgcgatccggaagacctggattcgtacctcgagcacagcaattttctggcggatatcaacaacgagcgggcggtcaagaacgagacgtataagaagaatctggcggcgctgaatcggtttgccatgtttatgtttgaggatgatacggttgctgttccgaaggagagtgctttgttctcggaggttaatgctactactggtgaggtgacggctctgcgcgagaggccgatctataaggaggattgggtcgggctgaagcagctggatgagcaggggaagctggacttcaatactgcccctggagagcatatggatctgtctgaaaagacgctgcgcaaggctttcactcagtactttggtccgctggagaagtcgcgtccttcgccgggtctagttgtgcagcccgtgttctgatcattctcttttgggcgtttgcttttattgtacgatatcccaactgcgtgtgcttcatattttggatactagcctcaaattcgaagtccaatccaacgccgtatggctggttggttacatttatagaactaccatttcttgccatgttcgttctagcaccgtctattttatgtctattgacaatgtagctagttacacaacgctgcgactactcatcgcaagctaacaaaggaaaagaagatgtgcgtgccgacagacaagaaacaagagtccaagcgttcaaaaaaaaatatgcaaatgaaaaagaaaaagacaatgatgggcaccgagccgaagtaaaataaccgacaaaacaaaaaggacatgcgtatcgcaaaccgctgtaaaaccgcgaccggcaaatcaaaacatgaaaaacaagggagggcgaggcaggcgggtgagaaaaaaagaccctaacagaaagaaaattatatagacatatgaagggccatggaatggaaacagctgtggagatgcccgcagaatgatgaggtatgaatcaaacaaagaaaatcaataaggtggccgaccaaggcctccactgcgtcgtgtgctgctagatctgctcggcagagccttggaggcagatatggcagttgccgggcgggatccattcgtcagcttattctcgtttggcgagaggaacccatccaagagcttccgtagttgatcttggtggttgccatttaggtcattggtctcatagtcggttaagagttcgggaatcccagatgtggcaaggctgtggttggaccggctcttgttgcggtttagaggcttgtagtttaaggcattggcatcagccctgtctctcgctggaggtcccgatggggctggtgcggtgaatggacgatcatatgaggccagcgagcgctgtgagtcattcgggaagccacctgggatcgacaagccagttgggaccggtggcacgggagggatgtcttcggctttatcgcctgataggaaaaatgccgcaggcgtggcgcggggtgtctccagtccatcgtcatcgggtgttcgttggctctctggtcggattgaggtagcatctccatctatctcggaaacagagaagttgccgctcatcatgctttcgctcccggaagaaacggaactgtcattcgatgcgtcaagtcgtccacgtagcggactgaggcgtcgatcatgggagtcgctagtaaccgaaagcacgcgtcgaagctcattgacgcgaacaggcgagctcctgcttgaactgttggatgacgagcctgagatctctggaatgctcatgcggcggttatattgggagccggcgggtgagccattcgtagccatgttggtttggttgtagcggggatttgtagtagctcgagagccagataccgatggtgttccagtgctttccttatcgacagctgccaaacatgcctcgcgagaccacggagacaacatctgttccttcacgacggacgggaggtggctctcaacctgggatttgactgttgctgtggagccaagtaccgggaacgtgaatcctcgtgctggggaagaagccgaggaggggctttctggaggagaagataccaatttgcaataagactcctcaatcatatagacaagtccttcgacgttgcagaatggtgtcaataggggtggggaggtggagtcattgtcagacctcttctcgctgtcaaaaacaatggcatgaagatcgactgggggtaggcggattttagaaagccagtatcccttggcctgtcgctgctgaatctcattacttatctcctggcccacgggggaggactggatgtcgaaatgctgagacagcgcaagaaggtatccgtgtaccaagctgccaatgttaacgcgagctgcgaaggaactcaaatccatagatgtaaacaagtcgtcttgcaatttaaagaccatagggacaccgaattgagcggcattcaccccgaggttctcgacaagatttgcaagaagtaggtgcagcaggaggatctcggcttcctcggtcgctgcctcgattgcagcatcgtagatagccaggtgcagaaggcggaggaagttcgactgtgccaccagcgccactttgtccctctgggtcgcagggaccgacgaacctcgtcgagtcggcctatccatctgctcggtgtctttcttgggagtcttgatgtacttgggtgaatctaatcgcaccttgaggtcgttcccattggtctcaatctgcagccatgataagaatgcatcggaataggcatagcgaacatcacgatccacatcacgaagaagtacttgggttccttcccacacatggatcccgactgaatgtctagattctacaccagacatggttgctagcgtttttgaattggccacaaccaagatggccttgacggctcggagagcagtcagtttagcggcagcatgcgagaaggtttctgtgcttgctttgtctccatttgtctctggttcgtcacttgtcgcctcatgtgtcactccggattcctgaacggttgccaatgtggatggcgaggaactatcatggtggagatgaggcttaaagcgcctgagaatggcccgcatcatgtcttcgacttggtctccgtagtatatgtgtgttgcaagatctccaatagactgttccagtagcgtaagaagatcctgtcgttggggagagatttgaaccacgatttcagcttgtcgatttttcttctctccgtctgcagagccagtacgctctgacggtgacagtatctcagaagcgtagtgcatgagtccatagaggacatccatgacactgagtccaatcatgttcacagacgatttgagaagcgaatccaccacagagagaatggtgaatgatgactgtaatgcatcctcctttggggttgtatcatggagaatctccatagctgtgatcaagatgataaaacgaacttgcaccgggcaccagttcgcaatgaggtcgatcagagatgttgcccagttgccacatttgccctcggtaatctcgccgcgcttttcgctctgcgggaagccctttctcgaaatgaactgtagaatgaccgttactacaatacggatctggccccggttactccccgaggcgatagtctgctcaagacagcgcagggccaagacccgtgcatccatttccgcctttcgatccgcctcagcggccgactgcgctgccagctcggggtcaccttctgccacgtccactgtgtgcaccgtgttgacactcattcggcggggtttgggcggctcgcgttcatttgcctcggtttcggatagcttttctttcagtgttatgagaagattctcatcttcagaatagaggttcttcagtataaccggcaaacagagcttcagcaatgttcctccatcggcggtcaaggtctctgagctgaccaccgctctaatagcgcgcaatcccgcatttctccaccggatagccacctgcgggctgaaatctgtgttcgcatttgatgtaaatcccgggtcggcaaggccggtgtaagttcgcacaacttctcggtattgatgtgcaaggctctggtcagccgcgatggccgcaatgtcctgatatcggcagaacatttcgaaggtcacaatcgattcctccaccatatttatatcgttggatcgcagaatggtatcgattactgtcatgacggatcgggcgtagataggaaggtcgcgaggaactttttcgatgattgcagctaggatatgcagcgccacctgaacatttctgtaacgaaatcggtcagtcattcgtcttgtccgagtccgattactcgggcgatcagagtctgcgctcaccctattctgcgtctccagacatctcgggcaaccctcttctccagaaaaccgcagaccttggtcaacttgctgcggcgcgtgctcgtatagtatagcaggtatgagagttcgctggagttcggccgaacctccgacactcccttctggtatttaggataacatttcaaggtcaagacctggtgctttggccggcaagactggcgaacagattccattggaaacgcagtgtcacatgcagttccaggcgggggttccacgaaagaggggaacttggtagtattcgaggtgaaagatgaattagagacaagcgagagtgcctgagagagtattagttaaggtccatgggagagacgttggaatgttcgaaccggcgcaacgtacggagtatgtagatgacaacggggttgatgaggtacttgtgcacggaatagttcagggccgattaccagggggcggggctctgtcgtaacgagtctgaaaaggcacagaaatcttcaaaatgtactgatttgaaaggaatggaagttggaaaggggagatgatagaagaaaaaattaaaacaagattgggctccgggatcatcgggcgtattctatattctacctgttcgtccactcctgtctagtcttacgtatacatagaaggtcctagggtttatctttttcatattgttttcgtgtttcggaagaattgcgcatcaagataatattgttaattccaattgctatccccttcattattaggagagtgtggcgataaccccaaaatgacatagcgtcttcagctcggagatatattgtcggtcatctccaacgccgcttagtcttttcccccgcaattctctgccactgtcgtcagagcaaatggggcacttgaaaaatcggagttcactgggagttcgattgataactccgaaacctcgggggcctgagaatcctcggtcgcacagcacgttcaccaaactcccatgctcaactccgccaaaggggggctcggtggaaatgaaatcaccagagtttgaatttcttgttcgacttaaaaatgtcagggcgcggtgtgttcgtatgacatctcggtcgcagcgatcgtaggatcggaattcaaacgcatcatgtcttcccattttggacatcttcctgcttttcatctgccgtgtcggtttcggcctgggctggttcagggacactgacccctgccagaccttcaatgacctggggtagaataatgtcacggcggaagttctcctcctggagcagtcgaagcgctcgcagtgtgggaccagggtgggtgaggaactgagagtactccggtgtcttccagtaggagtagaggtaggctaggtaggctgcaaatgcctgcgcgtctggcgagggggagtcatcgtcatcgtcggcacgagcgatacccaggagattgggataagtgactgccaagtgtgacaaatagtaagggttggcgagggacgagacaaattcaagttcgagagtaaaacgcgggttggtcaggtttggtcgatcctccatggtgaatctgatagagaacctcggaggattgaaatggcagaagctggagagcttcaaagtgagggtgttacggaaaacgatagcgtccattgaagtaaaaagtatacaaacatcgaagtactactcggtacatttccaactttagctctcatagaattcctatatcaactgcactatttcctcgtctgctcttggtccatatcctcaaaccatatactcttcttcttcccccctcctcaatccccttcgagctcattccaacttctccaaaagcccagccttctccaacgctggcctagcacactcctgagtccagcgagagaccctcaaacgcctcatcctagcttgggcagagcctgacaaagccaaggaagttgcaggtgtcacatactgctggttctcctcgattacccgcagcgcctcatcccaactaccggggtagttcttgataagggtagtgcctattagcatcaggctttctcctatttccgtgacttcatgcgccctgacgctcacacggtcgtggtataagtgggcgccggcatctttagaggcaatgaagtgaatgtggccgacctcttcgttggtcttgacaaagatggccgagtcgccttctgggggagaggaggcgaagttgtatttgacaatgtagactttgtgtctttggggctccgccaaagtgacgttgaccatggtgtcggtgatactcttcgtggtattgttcatagtagaaaaagttgcttcgagggtttgtctttgcagaaagatatagagagctcgaggagtagacttggggatgatatggaggtagatttacacggcgaacgctgactcttaaatactctttgtctgttttattcttatttctatttctgtttctcttttccaaagaaatcacaaaggcgcctctccattgtttgaagtcagtttcagttccccaagcctatactatggctttaatattactatatctatagaagccaacctgtaagcctataaataccaatagattcaataacaaggactatatagatcacggaacaacagaacaacagaacaacagaacgccaggaccaatggaaccaacagaaccaacagaccagtttcaccagtccacccaaccaaaccaggccattatatcaatggcgtgaagaggcacatcaagatatatttattctcaacaaagtcaaagcctcatggcaaagcaaatcctccgccttctcacgagacatagccaccatttgtttcccgctcagtcgctcagcaggcaagttgcacagcagagagtcccagctcttaggatatcttcgaagacgtgtggtgcccgtgaacaccaactcagtacccttgaatttcgggtgttgggtcgagtatgtcactcgttcacgattgtagcaatacccccagacggcatcgtcggcgaggtagtagtggtcgccagtagaagatccctcctcactaacgaagagggctgagcgggtcgggtgcccggaaggagtgcatagggtgtatacaatgtatacgttgaggtacctcgatgaagattgacccatggtggtatatgtgtgcgattttggaaggatagagagttcaatgatggagagatttggagatgatagagacaggtttatatggcaaatgatacttcttaaatatcttcggaatcatcattactctaaactgatatatatcttggatatacaaactcgaagttacattatcatcggtttctatcgttagcgatccaagtggtcatgaggccttgcgttgaaacgaggccccgtttgagatgatatctatagagaacaatgtattgtcttctaataggcaaaagctatatctcacgaaaaatatgcacggcgcttagcttgaaggtcagtgcgtccaaggaaactccagaactgaatattcgttgccatccaacatacggaatacggagtataaaattccagtaaactctagccagctaaaacatttgctgtgtcactgtacttgtaaaatctaacgaaggcgtggcagagtcattaatgacatgttcagtctaatacttctacagatagagatcagggatgaaaccatgttggaaccaacgagttcaattatcatatccttttcaaactgacatggaaaacagcaatcggtaaaaaaatacatgtctctgaaagcaagactgaagctgagatacaagaaagaaaaaaaccttggaaaaaactccgatcatagccatggtcttatcttaagatcagggcattgtgtttcatggcggtctagaatcagaagcacttggaagcactctcttccgaaagatacgaacgccatgttaggcgccgtgcgttcatcggtgcttgatgctgggtattaacgtgtggaaccatccctccccattgaggagttggatggtgagatagtgagggaatcatggatttgacacatcccggaggtgcacccgagtgagaaaggcccgcttgctacatcgtatatttccgggacaggctcaatgtgtgactgctaggtgacctagtcgctagtccgtctttccggcttgggtttgcgcagactcttcatccggttcaagaacccaccaccaccaccagcagtgtttagcctcgactcttcgtaaggtcgctcgctgatgatcttgtgctccatttgcttaggactgctggacgatcgaactcggccgccctcgaggcgagcttcgatactcgatccctttttgtcccactcttcctcatattcgtcttcttggaagtaggggtttctttcataaccccgggaggttccagaatggctggagctcacctgtggcgcaggggggtagttgtcgtttggataagcaatgcgaccaggagcacctcgtccacgtagtcgctgagccaaactcttcttccgtgcaaggccaccattcggtcccataccgttttcattctcagtctgatggcgtgaaatggcagaccgactagccggagctccatcgaggaaggtgctggttcccagtcccatactctgcggcccatgaatcgggtctactcgggcagtgggatccatgacagccgtctcagcgttgcggctcgcagcggtcgagaagtcggtgtgtccctcctccatcctgccatggaaaaggtcaagatcgatgttagagttgttgggccctgcgccgcccagagccatgttgctggaacccttggggaaagcttgcattggcgcggtacgcacgccgcggcgattgcgatgagggttgcaggcatcaaacggaccatcgtggtggaacactattattgcagttagcatgagccgtatactgaaaaaaccgtgatacttacttccggtaccgtaaatactcgtcacatccaacttatcaatgatatcaagtcgtcgatccttgcggcccgagcgcgatttgccatctttgctgcgactctcacgctcgcgacgccgttcacgtcggcgcttgtcgtcgtcgtcatcaaggtccaacagcgaacctcgatccattaccgaagactccgagttccgccgagcacgacggggcgccttgtccttggaggtttgggacaaagcaggggggtcggcgaatatgtcgagcagatctttctgttttgacaccgccggtcgtcctgctggacgctccgggcgctcccttgagggtttggtgcgattcgagggagtgcgttgggtggcgtcagacgccgcaggccgaggaagatttatctggggggcaggcttgagggagagggattcctattaagaggttagaccagatttgagtatgtaggttcaagattccgaaacatacaaagagctcccgagtgttggacgacatatcattcttctcaattggagagaacatattggcactagtcgacacgccaggggtcggctgcagaggtataccctcagcgtcgtctaagaatgggtttgtagagcgtgggcgttccggacggttgatcgatgaaatggatccaggcgaaagagcgcggttccggaaggggttattggagccaaaactggccgctgttggagaatcttggtattctgttggtcgcagagacgttttgaatcagtcacaggtctgaaaaagatagaagaccagaaagtcaagggaaggtgtcatttatggatcaggggaggggggttcaaactacccccagcggtaacgtctgatatcctatgatttaggggaggtcaagcttctggttacgtaccctgcggggccagcgacacgccaggcgcatatccaaacgctggagtggcattcattgtgaaggatatttcgcctctgaaacaaggtgtgggtggagaggccgtttgcgtgcaatgagatgccgcgttaggtgtcgcacgaatgcggaagaaagtggcaggaggtagtgctgaaacagtgataatcaggggtaagatagtatggactaccacaggtcaagttcaacattcaataagcgagaaggtataacagaatcaaagtgaaagaaagaaaaagaagtctaagggagaaaggagggggggcaaggggattagggaacacgggagaggcgagcatacgtaaattgcccagtgatcgtctccttggggaaatcatcctctttcacttggccctgtcgatctttctatttctttctttacattatatgtgttcatgtttttatgctatgccgttcgggcttgtgttaactttttctcgctctgccgaatccccagactggcgttatagccgtagaggctaataccaaatcatcgccaaggttccactttgacatgttgtgacagttcaggaactgactgctatgtactctgtacattgacttcgactggacatctggggacatcccagctaatcaggcacgtactttgtacattgtacataaagggatggagattcctcggctaccaaaaatagcccaccccggggaatgacgttgccattccaccttgatatcatcttctgttcctggaatgtgtatgcaacatgatatcttctgttactttccgcatctccagatctcgtgcagtctagaaagatccaaagtgatgagctcatctgccgagggagaaggacgcaacttcacttgcagtccccgtggataccactaaaaaggttgggatatcagttatggccaatgagcggtggctgaatatgaccgattcgaatgctagttcgctgtatctgcatataaaaccttgcatttcgaatataatgccagcctctccagacagtttagccgacatctatctagtatgcggagaagtattcgggactcggtactccatagatatcgaacattcttcggcttggaatgcgatctaagatgaggtcataacttgaattaagatatcattggacttgcatacgcagacgaattaggtagaaactacctgttttgttcgggttgaatagtgaatcggtcaaccctagccgccttaatgcgatatctcaaggtggatgtggctacgtcagatctgaacctacctgtgttatcggaataccatgttggatttactgctatgtgtcatagcagccctaggattttcgtatgcgctacggtccattcatcccaataaagtagagtagttttgggcgtacgcagcctgctaccacctcaacatacaaattcgaaatatcattcattgattttgtattcattaccgtgtcatggcccaattcgaggacgggtcccctttcataaacgccacacataagatgcaaacaagatggtataaaacacaaaagaaaccattcaacggggaagccccaacccgccttctagaaggccgttcactgggcgatggattgagcccgcggcaggtgagggttggagacagggatgcccgcacggcgcttggactggggctttggtctggagagtgtatatctgaaagtagaaattagtacaagattccactagattcaaggatggagagaaacatacttggcaaatgcacgagagagtgccttcttgcagctgaccttttgactgccgatgaacgaatccacagtaacagcgatggcacggtcaatatctagcgaggagcagtactctgacagacgcatcttgcagaaagattctgcgatacgcatgatcgcttcaagatgacgaacctagaagattggagtaagaaaattgtcactgtatagacggtagggagatgacttactgtaatggggtacgctccggtggcaagggactcgcggcgcatgtctgcgaagagacgggcaaccttgtcctgatcgatctgataaagcttggggtggcaacgctctcgggcatacataatatacttccgcaggagctcctgcgggatctcgccctctttctcctcttcgtctctttgcttctctgctgcgcgtttggcgatctcctcctgtgatggaggcagtctctgaccatctcggttgatgcggtaaccctcgttgtcaataagattgccgtcggtatcaactaactcgcccttttcgttccggaggggacgagcggggttggaccggtggtgtgattcaatcacgaagttggccaagcgctcatcctcggcagggtcaaccaaatcacgcaccacacagagaatatcgaaacgagacaagatagggtccgtcaagtcgacattctcggagaatgggatagagctgttgtaccgaccacccttggggttagccgcggacacgacagcacagcgagcctgcaatgttgtcacaataccggccttggagatagaaatggtttgctgttccatggcttcgtgaatagatgtccgatcctggtcgttcattttgtcaaactcatcgataagacaagtaccccgatcagccaacacaagcgcaccaccttccaacgtccattcgctcgtgagaggatcgcggcgaacactggccgtgagaccaacagcactagcaccctgaccagtggcaaacacagcacggtgggcggtcttctcaacaaacttgagcacttgagacttggcggtaccaggatcacccagaagaagaacgttgatatcaccacgaatgtgcatcttgccctgggcctctttactaacaccaccaaagagtgaaagtgcaacagcagtcttgacatcctggtggccgtaaatactgggtgccatagagcgaataatcttgtccacaatatcggggtcacgggagagggctcggattgcgcgctcatcctcttctgtcagattgaaaccagccagctgatcgtgtgccttgaccacatggttggcctcaattacggtggcgaaaaccgggaagccgtttttgttgttcagttgggcatcgtagctgttacggtagacgccggtaatctcaatctcatcaccgggtttagcgctatcgattagatcggcaagcaaaacgacctcacgctgccgcggcagacgacctgcgggaaccgagccgggcgactcctgcaaggtcaacttctggtagttgcggtagactgtcttttcagaattgacagtgaagggaccacgcgactggcagttctgacagaacgagatcttcacctccgcactagcttcctgctggaacggacccaaggtgataccgcacttcttgcagaggaacatgacgtacttcaattgcgggaagacaccagttctacgggtaacaacaccactgacacggatcagacagttgagatgcgactggcgcagctggcgtagggtgtaaatgatcggcacatcagtgatgcggacgtggatttcgttgtgaatatcgtgatattgtgggtagtggaatagcgtaacgtcgagcgcaacctgatcaaataccttcaagacttcggtgggttcgttggcgaggaagtatgacaaagctgccttggtctcgctgaggtgggcgtacgacacttcgagtgaagcggagttcacctcacccagtgtcttgattcgattaccgtaaacagactggccagcggcgtcgatgaactctgtcaggaaggccttgaattcacgatagatggagcgaagaacctggggctgtgtcacccagtctgtaatgttggctgccttcacatctgccagttcctccaatgacagctcttccatgccctcatcagccatgtcaatatcttcacgatcctcatcataatggtgtctgcgtcgccggggttggcgcgacagatccagttccatatcgtcctcatcttgtaaaaaggcggcaggcatgcggcgccgacgtgctagttctcggtctctctggtttaggcgggcatctagctgccgacgagttgcggcatcgatttcatcatggtcttcatcatcgtcgatgtatccgtcgttttcatagcgatcttgcgctgcatctcgataatcccgctcgaagttgtcaccgaacagatcaatgccgtcctcgtcttcagccaattcgtcaatgtcatcaatatctggcactagacctctatcctcatcctcatcttcatctcccatgtcaaaggggatcggaggaggggatgagcccaaagcagtggctgcacatgaacatcgtcagtctcaatttgacgcagcccggacaaagaagcaaacatacgactggaaggaggcaatggcgccggggaggacatgtcatcctctctgtctctcttacgagtgttggccccccggccacggtttgcggccgaatcgctggctcggagcggactgtagtgcattagcttttgagcgcagaaaattcaggaggcacactcactccattgtgtgggtatttcagctggcaaaattcaaagaaaaaagatgaacggcaggaaattatgagtatggataagtatatgtatgtttcagaggttttttactcgagtgtgtgatagcgtggttgatagaatgaagggagggagaaggggcggcaaagtcgagttgtgcagagagtcgcgtccaacacgcgacgcgtttcaattaagccccgattaggaaggtgggccttccacgttccctatctttacacaacgggctcctggtttattttctatggcacaatttacagcgctgtaactaataagaacaaaaaaaagaaagaaagaaaccacattagactaaagcaaaaattggaacttgcaaaaagtcaatgaccgacgcagggatcgaacctgcgaccttctgtgaactccaacatatgaaatgtaagacagacgccttaaccacttggccagtcggtcgttggagtgaacattctgtcgcaagtgtgattgatttcatgactagttcctttcaatttcaggccgcctgcccattgagcattcaaccactttccaagtttatagcatgctcaccgctcaacaccggtttgccctttatccactttatacatcgatgtatacaaagatccatcccttccacatcaagttcttgatcaaaacatggatccattaccccaggacaaaacaccgtcgcgacaaatccgtgcggatatcaccgaaatggctgcgaaggctctagtcgataaaaatatccctcttgtagagtggggatcacagatacagtacagatgtggataccctttgatccttagagtaagagatgaaatatcctatccagcaatttagtcgtggggctctactgacttcctaatcctagcttgttgaatgggcggtgcccgatgcgctgctatcgctcgcatcccagaccctatcagaccggggcattccttgtattcccccatccgcagaggctactgcgatatatggacaatgggaacgagcaggctttgttcacagtctagatccagttcgttcgcaccgaatatttctgtacccattgtcgcttctcgacctcactctccaagacaccgtagaagttacatctacctttgaccatacgctgagggtcttgacacctaagcctcgaatgtacatgatatcactaatacgccatcttctcaaccaccctattggtgacagcagcagatatcatgtggaaagtgatcttgttggttttatatcctcttacatatttcatgacccacctctgaatactaagaacgatgaagtcgacgatgagagcgaagaagacttccagaaacgggtggaagaagcagttcggaatatcaaaaccagggattggggctcaacggaggagaaatatttgaccattgctgaacgtgtcgtccgcgactgtcggtctatttcacagctctctagttgcgaataagtgcaaagtcctgcgcctccatcgtgatctcaagcagggcacgaacagtagtatgtagttcatacaacttccgaacccatgaaagcaaatcgtcccttgatttctccgggtagttcgtgaaataaatgcgaagattctttcgagcaagccagttcaagatcgccgtaatatcctcaaagtcaccgcgagcctttctgttactttggggacgggtggattcagcaataaacgcccatctcttgatctttgtaagcacgagaacggaggggtgcacaatagggactataatctgatggttagtaagagttcgaaatctagtataaagtgcaaaggcaaaaggacactaactcgggacatcgccaacgcgtcctggtaagtcgctggcggagacatggtaaagaggaacggaacttgcatcgggtagcctcgaaggtcgatttctgccgccacgaagaatctcaacccgaatcgtaccctgatcgcgcgtaaaaaccaggttattgctctgggagagttggaacccgggcacctggagcagcaggtttcggacatcggctgggtctgcgtcaacgaggatatcaacgtcctaggtagttcaaattagcttgagtgatcgtgcaagtgttgagaagacactgaaagggcgtacatctgtcatcctcattccaccaacaagggacaccgcgtatccaccgataaagccatggcgacagttgccacgggtgagagcagccgtaatctccttggctgttgtatcgagatggtcgaaagtgctatgtatgaactgctcatgtgtttgttccatgatgaagtggtatgtctttctaagtgattggtgctagcgagagatgaacgaagaacaacttgaaataaggttatagagggaaggacctaccacgggaacggcctcaagtacatacctacatgtactagtagtgttcgaattggtgtttgtctttttcttttaatagtcctttttctgttttcatgtctttcttgatctcatttctgaatgtcttccctctttctagtgttatataaagctcatagttttgctcggagatgtggcccggatattatgacccgtgctcccccaagagccaatactcccacgagcaaggctgatcctgcccatatttgcccagccaaatagccacctcccgtgcgcgcgatcaacgctcccgccacggatggcccggtcaagggtccgaagcttatcatagagagcgacatgccgacccgagtgccgatcttgtccaggtctttggtcaatgaaggaatagtgccagcgaacaagcccatagcggccgccgatgccagtccataaaacacagcaaagatatataactcggccacagtatgaacggcggcccagcagaacatcagaatgccgcacagcgctacccaaggaatcagtaggttgagcggcccgatataacgatcggccagatagccacaaggggcgcgaatgggtatcccaagggcgttggtgacgataattaaattcactccggcttcttgggacaatctgagcttttcagtcgcatagacttgcacctggaaaaccgtcagcccaattaattatagatcttggatttggcagcgtacgtagaagaaggcaaaataaagggtccagtatagaaggaatacccccaaggtaaaaagcatgtaggccggttccttgaaagcgctccattcaatcagtggtcccgctttgcgtggtggtagtcgaggacgcaaaagtgctaaggtgattatgaccatgatgagcacgacaaatcccatacacctgacagcccatggaaaccctgattatgtatttatctgattagctatgaaaaccagtgcggctgaaatagacttaccgatcttcggggtaagatactggatcattgcagggaaaatcatgccccccgtacttgttcccgtggcagcagctgtgacggcaaagacccgatagcggacaaagtatgtcgagatcaatgtcacagtaggcagccacatgagaccctggccgatgccaatacaaagtccctgagccagaaagatctgccagtaatccgtggccagactcgtcataaaggtcccgataactaacagcagcccacctagggctaccaccggccttgccaatccagcatctgttgcgcggccggagagcgttgagataaacaaaagacagaagacttggaatccaccgatccacgaaatatcggagggggcttgtggtagcgtagactcataataattttggaacaccccgaagctggaggcgtagccccaagtcagggctacgaccaagtgtcctgcaacgacctgagcccaggcatgaaatccgccatctggaggtgggggcaatggtgcatttgacgtatctctcactggcgcatttggtgtttgggtattgttccctttctcttccccgctcgcaattgctccggaagactcgtaggctgtcatatttcgctcttgggagaaaaaaagcaccctcaagaagagcagattaaaaatgatatagatgcatggggggaaaaaagggtggggatctcagagcacaaaaactggatggattagaaatccatggatgatccctgtctttgtatgtcaccatcagatagcgggtttagaaaatacacttttgtctttggatagggcaaataaatagggcaaataaagaaactatagtcttagtttcctacaggaatgctccttgaattggggtagagctatgtgtcaaggtgagtaatagcattataaaccaagtatggagtaaaagattgggagcgggaacatgcaaagggctaaccttggaatatcctgaaaattccaatacacatggagttacggagtcctctgtaatgtgtataggattgaagtcaagatctgcatactagtatactagatttccctccaaacggtctggtagccggtctagtatatgtctcaggtatagacccaagcattcctgggaccgggccttcctcaagatgtcatgaaggcccatgttcattcaagacattctgtacaaaggttctcgtcttgtaagtgacttatggcttgctccatggctgaccaatcaaggtcaaagtgagatttgcgggatacccagggcgggatatcccgcctgttccaccgcccctccgctccacccatctctgtgcctatccaatctaacaagcaagcacaattattgcaaagctattgagataaatgcaaatgatttttatcctaaaatgtttctaacgtagctttttgcctggtgggcaggcatatgatcttgcgacaaatcagtccttccagttgaggtgcaagctttgtgaaaaatttcagtcaagccgcctcattgagatcaatacataaatgtagatcctctaggcctttcaatgtagagagtagagagtcaaattgttcttcggagagggcaattctggggccgatattaccacagaaattggaatagtaggtatatagctttcggggtctgcagcttgagccatatagtgtaagaaaaagcttcgataattctaaggagtttagtttccttatctagctacactgaccagtatgggtaaacgctcataggctataaatatcgaacaaaaaatcaatccggcttattatctatcgccttcctaggaatagaactgtctactactatagattaagcaaaaattccgttctataatctgcgagtcctaatgtttaggggttctgaaatcgatcttatattcccgaagttgaatactaaacgcttctgattctagtagattggaattgtctgtaggtatagctttatagatagtataccgactttccagcttattgccattaacttgtcggcagcttttcgatagtatatatactatactaagggacttttcagtaccattgaatagagttagtattatctatagctcttagatatacttacagagaccatttgacttggatagttcttctagtttatagagaatttcgcttatcacaatgaaacggatttttcggcaaaggtatccgcgaaattctccagtgagttcttgtacaaagtacggcatgataatctcagagcgaccaattgctggaaatccaactggttatatatctttgagattaattccacgggcagagctgcaatggatattttggctgcgtgtgtgacgtttcaagattgagaacaatgataataagaggctcgatttgttatccgcagaaatgagtgttaatcagccttactctctagggctccgggctctcttctccctttgacgagaaagcgaaagcaaggtaagatttctgcgccgagagacaatgagaagagtagtgcaacttgcttcttctttctctcctaatcttagttattttgaatagaatacactctgcttccttagcaaatcacaggtatctgctgtcttagctactatcatatgcagtttggtacaaaagcggtatacaaattctcagctaaaaccggcacctgcatgtctatctagcgtgcttgttccacttatgtagagaaaacataagcccatgggcggtgtagggcggtaacgcctgcatttgttggaaaatgccggcagaaactttaagttacgtcgcgacccatcacgtcgcgtcgtgatccaacatatcgcctcgacacttaggacttaggcctttcgttatttgtcaatttctacgataaggacgctgatacaattcccaaacatggacgccccgcactcggttgttgctcaactcaccgaagatgctcgtagtgagagcatgggctcccagaattcccagaccgcgaaagagtatgtctccccaatactctcccccacactaggaaagtgatatactaattgattttaggtttattgaatcccagctccaactagaggcagatgcgcgcgaggctcttccttatgtcagtgtcccaagaaagcaggtggcgcggcgtttgacttatctcaacagctgacttattgactttaggcctttgactcttgcacatatgaccttggaccattgcgacaggtactctttgcatgtctcacctgcaatcctcctcctgtcagccccaacgaaccctacactgccgctgccgtctgttactcgtgctcgatcgcttgtcacggcgagcataccctagtcgagctcttcaacaagcgcaacttcgtctgcgactgtggaaccacccgtttaccatcatcttcttgttgcacactccgtgaagatcccacaaccggcaaaaagggtgtgcactcccaagaggctgcagcaggcaacacatataaccataactttcgcaatcagttctgtggctgcggcgaacagtacgatgcggattcagaaaaggggacaatgtaccagtgcctaggacttggcaccgtcgagactggaggctgtggcgaggactggtggcacccggagtgtttgatcggcttgtcgcgtggttggaacaaggctgccctcaaggccaacggactcggtggcggtgatgccaccaatgacacttcagccgagggcgaagaagatctgcccccacctggctttcccgcagaggatgattttgaccatctgatttgcttcaaatgcgtcgactctaacccctggatcaaaccatatgcgggcactcctgggttcttgccgccagttttccgagaaggtggactaaaaaaggcctcgaatggggctgagctaaatatgactgagccaaacccctccgtacccgccactgagctcaaagagactgaacacaaggatcaggagaagatcgaacactcaaacaagcgcaaggcagacgacgagggtccgaccgaaggagagcctatcaccaagcggattaaagaggaagaagctcatgtcgaggaacaaccatcgaatgtcacaaaggaagaggagcctaccaaggaggaaaacgatactcctacaaagccatccgcccccaagcacacagagctcccgaagtccactccagtggaatcattctctctttttgccttggatgatttccatgggcagctgtgtcgctgtgcagagtgcttccctaagcttattccctacccccagcttcgcgaagaagaagatacctatgagcctccgatgtccgacgacggcctggctgatggtaccgcaagtgtcggtactggcagcatctacgaccgcggcgaagcagcactaaacaacatggatcgagtgcgcgccatcgaaggtgcaatggcatacaaccatctgcgtgacaaactcaaggtctttctgcaacccttcgctgagagtggacaggctgtcagcgcggaagatatcaagggatacttcgaggcgctacgtggtgatgagcagggcatcaaagatgccgctcatcacgcttctaccgtgaatggtgacggcaaggatgatactcacggagataagtgacacgagcagcatggcatatgactgactgtcaatttcttgtctgattcaccgaaaccgactcttcgctttggtcgcaaggtactgattatctttttttttctcgcaatctttttatcctttcggcgttatcatcatcgggtgctatatgggggtcttcgggggtggttcaacatgtacgatatttagcgaatatgggattgggaaattgggcaatggtgggaggtatgagtacgaacggcgcatcgtatgcaattgaaatgattactatctagcagagctcgaatgactccttcaattggggatcaacccaccttcatggtacaaatacagtggtctcatagcctccgggctaaatggccatgatgcaaccccccgagttataacgccaataccgaattaaatatatgatgtgggtggatatcatggccagcctgtccacgcaccgcaaaatatgatcaacagatatgcagcaagaatgaaaagactactccttgaggcgcttggaagccctcatcaatgaatcatctgggagtccactccgtttggtgccaggaagactaccggtgcgaatatcattgtcatcttgggtgacccgacggtgtgggtatttgccctcgataccctcgaagcagttaccactgatagggccaccattggtaaagtacgggtgctcaagcgcctgctcggcagtgagtcgcttcgctgggtcatattcaagcatacgcgacagaagatcgaatccatcggcgccaggagtgccagcactggaggtggacgtgtatccgccgttcttcaaacagctctgataccagccttcaagattagagccgcgatggaaatgtgaaggttggcggtggagcactagggtctggagttgggaatattcaggcatggaggctagacccggccaggactctttgcggggaagaccgaggatttcgacaatcttcatcatctggttacgttggaaagggactgttttcttgctgtccattttggcttcttcgcctttgaagattggtcgcagcgagagtagttcggcgaagatgcatcctattgcccacatatcgacggcaggagtatagtgccggctccccatgagcagctcgggtgcacggtaccagattgtgacgacgaccttgtctcccgagaacagggagttgagtggcttatagaacaggcgcgctagccccaagtcgccgatgcgaatggcgccacttgaggtgacgagaatattggctggtttcaaatcacgatgcaggacccaattggtatgaagatagagcaatccattcaacaactggaacatgatagaccggaccatagtcgccggaatggcatgtcgctgaggctgggtgtgatgatgaatgatctggagcaaatcatgctctgtatattcaaataccatgaagatgcatttgtcctccagaatgatctcttctagttggacaacattggcatgtgagagttcagtgcacaatgccatttcacggatagccgactgcgacaaacctgtgtactggatcgtttcgccttccttgtcgggcttgaatctggatgaggttagaatgaaaaaaaaaatcaaatgttggagggtttttacttcttgattgcaaactcccctttcttgccatttttcccgacggccttgtacacccggccataggtgccactgctgataaagcctactatgttataccgatctcggacccggactttgctggtatacccaccgggtcttcttgattcaatggcatctgtataaactcccagttagcatattccggttgccggattgagaatggaatgccaggcgagaatcccttccaatttgcacactcgcatcacaaagacaatatcatcacagagaatcaaagggaaagagttaccacgagaatagaatcctccagaattcaagaaagggaaaccctttccaaacatgatggaaagatagaaagagacaagccgttacaccaagaagccacgagtaatcagattcaaagaagatatataattaccatcgacagtagcctggtgactccgtttcaagttaccgactctggttcgcgagagagagccggaggaagagggcgggtttgtcagactcatttgtggatcagaagggccggcgatgttgtcactccattggcggggagatatcttctccgcgatttccagtttgaatacagagaaggattcgaaggattcgagagatattctaatgtattgcctgtatcgtctgaattgtaccccgtatgttgtacaatgcgatgagttcagcggagtcaacgcttagtcagatcacatgtcggatccatccagcttcaacttcttgtagcttcacatgttcttcaagtcaactagttcaagtccctgaattgtgaaggactctatgtgctaaatttaatgttacatttgcctacctaggcagaccttcccgtctgaccaacttgacctcagatcatcgtatctctacaatcagcaaaaaacgtcatcctaggctccggccctccctaacgtaccttcaacctgtcccggggcatcgattggcctaaatttatctcacaatggttttgggcacattaacacagtcgagggttacaccgtacttgatctatctcgtatttattgtcacgcttggtccgcttcaatttggcttccacctggtacgatagcatccctctatgtctactaaacatcactaatacgttcattacttaggcagagctcaatgcccctaaatctgtgataacatgtgaacgtcaagggattcattcttcgggaatcacgagtcttccacaatgctttcctatgaccccatcgcaatttggcctcgtctcttcgatctacacgctcggtggcttacttggagccctgctagcaggacccatcgcaaccaaatatggacgtctacttgcattacgagtcaccacgatattctttattctggggcctgtggcggagacacttgcaccagcaatttccctcttgagtcttggtagatttctctctggaattggttctggtgctgcaattgtggttggtcctatctacatttcggaaattgctcctcccagttctcgaggcctcttcggtgccttcacccaggtcatgaccaatgtcggtattttgttgacacaatccctgggatacttctggagcaaagcaagcctctggagactcatactggctgtggccggaatcatcggggccctggagctcttggggttgttcttggtaccagaaagtccttcgtggctcgcagaacaccagaagatcagtcaggcacgccgcgtcctgcagcggatccgcggtcgggatgccgacattgaagcggagattgagagttggagcacctcagatgtccctgcatctggcgaggaagagtccttgctctctaattcttccggtgacaggccgtctagaaaggctgcagtcacgttcatgcaggttgtcaaagacccctattaccgcccggctattattgctgtggttggcgtgatggtcgcccagcaactcaccgggatgaacagcattgttatgtacagcgtgtctttactccaaagcatcctaccaacgacggctgcgctactcacagtaattatatctgcggttaatctcgtgatcacgctggcgtgctctcccctgcccgatcgcattggccgaaaattgtgcctgatgctgagcatctgcggtatgggctgcagttccatacttctcgcgataagtatcttcatgagcgctaagattttgacggcgatcgctgccttactttttgtggcaagttttgcggtcggactaggcccggtcccctttatcctggcctccgagctcgtagggcccgaagctgtcggcgcggcacagagctgggcgcttggtgccaactggatcgcaacctttgtggtggcacaattcttcccagtgctcgatgatgcccttggtggccgtggacaggtatactgggtgtttgcagctatggctgggttgttcggtgtcttcatctatcgatatgtgccggaaaccaagggcagagctaatgccgacgaggtttggggacgagccgaccgacgacaagactgactccagatgagtcctattctagaaatttcatagcactatgatttccaggttgttcctcggctaaactacatagtagcactcaatatttgtataggatgcggggttactgcagggccggagtacattgcataagttgtacaagttttttttttagaaacaaagcaatacatacagtatgtccatggcatcgccaagtacacaataggcatccatttttccaattgccaccttatgatcctataataacctgcggtgtggaggtttctttgatgtcgacccccgtcgacccccgttgaccgcaattggcagtgtttctcccacttttccccctcaagtttctctgcaattccgttgagatcggccgatcatattcaaccaatccctgtttttggaaataacggagagaacctggaaattacagtgggtaaatccgtttcttggcctgtgatcgacccgggacacaaccagcggatcggcgatcagctctggggggctcttgaacgtcaatcgtctcgaccagggagcaagccacccgccccaaccctttctattccccctactttcttttcccttcttataatttttctcatttgtgtacatccgcaatggtccggttggctctcccccaacggttgagctcgcacctttcggcgaagagcgcgccgtcgactcccggacggagcagaagcaccagtccgttacgatcaccggaactcaaacctctgctgctgaaggtttcagtaatccgagtaagtgctgaacaattgtggaccattttcatgttggtgggctccctgactgattccaatggtttgattagggacgtaacctcgcagccaaagatcgaggtggcacgagcgacccagtaagcaccctgcgatcaaagacaattcgaatcgtgaccgcttacatgttgcacagtatttggtgattacattaggagatgcgaggcagtcgacgccgaccatattcaagaccctgaacccggaatggaacgtctccttcgacatgcccgtgatgggcgtgccgctgttggaagctctatgttgggatcatgatcgattcggcaaggattacctgggcgaattcgatatcgcattggaggacatatttgctgatggccaggtggaccaacaggtaggtgaagggacacgttgctcggacaattggggactcgggctgacttgattcatagcctaaatggtatactttgaattccaagcggaaggcgtctaaaaagaaggatagcactgtgtcgggcgagattctgctgcagttctcgctcgccgattctgcgaaccccgctgccacgccggcggaaatattctccaagttcaagaaattggtatactcgggtgatgaggatgaccagaactctcagatccctcccgccgatcttgatgacttggaccgggacgaggatagctccgatgagcctgatgacgcggcaggtggcccagaaggcggcccagaagggggagaaaagcgccggcgacttcgattggctcgcttgagacgcaagtccctggcagctcgtgcataccaattctcaggctcgggcaccggagtgcaaggtatcgttttcatggaaattgttcgcgtgaccgatctgcctcctgaacgaaatggtatgaatcattctcctgcacgcagaacgctagatgctaattgacgttctagtaacgcggacatcgttcgatatggatccttttgtcgtgacctctctaggaaggaaaaccttaagaactcctgtcatccgccataacctgaacccagagtatcatgagaaaatggtgtttcaggtgatgcggcacgaacagtcttataccatcagcttcagtgtgatagatcgagacaagttctccgggaatgactttgtcgcctctgcgggtttttctctgcggaatctcatccagtccggcccagaagcagaccccgagacgggattatatcactttgtagaggacctggaggaacctgatcacactaaaggtaccaagatagctcagcgacctggagttagaccctcgcattcttcgtcaagtctctccaaactggctcggcctataataaagacgcgccactccgcaacatcagtctcaagccaatcaatgctcgaagcgccaacgcccagtctccttacaccttcttccctcccagaagaaggaatttcagagatggatagtactaattcattggcgaccctgaacatgtatgatggcgagtcagccccgattgacgagaacggcttcagatcatgtactattccccttatgctcaagaatagagaacggtgggaagacaaacattcgccagagctgcatgtcaagacgaagtatctgccatacagtgctctccgacagcatttctggaggttgatgctcaagcaatatgacgccgacgagagtggtcgcattgacaaggtggagatgacgacaatgcttgacactctcggttcgacgctaaaggagtcgacaattgacagtttcttcaaacgcttcagcgcggacaataagtctaatgaaaacgatgatttgacattcgaccaggcagtcatttgtctcgaggacacgcttcaaaccctgcagaagagaaattcaatggctgctcccagagcgctttcgcttcctctgtcaaacgccggaagccaagatagtgagccatctagcagcgacgagcacactttggaaaccaacaccattgctgctcttaatgccgatccgcacaacacatctattccaaccctgtccaatgaggaacaatccagttccgctgatgagtacctccagcccgatgatctcgcggacgatgggggcgaggagcacgtcgtcgaaattcgcgagtgcccactctgccaccagccacgtcttgggaaacgctctgatgcggatatcatcacgcacattgccacgtgcgcaagtcaggattggcgtcaggttgacaacttagttatgggtggttttgtgacttccagccaggcacagcgcaagtggtactccaaagtcattacaaagatctcatacggcgggtacaaactcggagcgaactcggccaatatccttgtacaagaccggatcaccggtcagataaacgaggaacgcatgagtgtatatgtgcgactcgggatccggctgctatataagggcatcaaaagtcgtgatatggaaaagaagcgaagtacgtaacccttgagctcaagtgtatatgttgacgaaaagatctgtttgctaacaaattctattagttcgccgtgtattgcgctctttgagtgtcaagcagggtcgcaaatacgatgacccagcctcggcatcgcagatcaaggactttatcaatttccaccagctggacatgtccgaagttctgatgcccctagagaacttccgcaatttcaatgaattcttctaccgtgccctcaagcccgatgcccgtccgtgctccgctcccgacgaacctaagattgttgtgtctcccgccgactgtcgctcggtggtatttgatcgcttgagcgatgcaactagcatctgggtcaagggccgtgagttctcgattgaaaggttgttaggcaatgcttacccggacgatgctgctcgataccgaaacggtgctgtcggagtgttccgtctggcacctcaagactaccaccgcttccacatccccgtagatggaataatgggtgaacccaagaccatcgagggcgagtattatacggtgaatcccatggcgatccgatccgccttggatgtatacggcgagaatgtccgcattctcgtccctattgactctgtcgcgcatggccgagtaatggttgtctgcgttggtgccatgatggtcggcagtacggtcatcacccggacagccggcgagaaggtttcacgagctgaagagctgggctacttcaaatttggtggcagcacccttctagtgctctttgaaaatggcaagctcaatttcgacaaggacctagcggaaaactccaagtgtgcactggaaactttggtaagagccgaactgatttatcttttttcatacttgatcaattgcatactaacactcctatcttatagatccgagttggcatgtcggtcggacacagcccggatattcctcagtatgaacctgatatgcccaagcagtcggagaacgtcactgccgaggaaatgcaagaagccaagcgccgcatcgagggcagccttgcaccaagcaagccctccaccctactcaagtcattccaatgatcctataatctgtctttctttttccttggagtggacagggctcaactcccaccgctctttctcactgaacatattgtttttcaacatcggtgtcggggtgttctttgttttccggtgaaaacatcatagcgtttatctagcagcatctgcgcattgcgaggattgggggtagaagaaatcagggtgttgcattttagagccagtcattcattaataacgcttaatatttgggatcatttaggtaaaagcagtagttagagtgatcaaagtagtagagcaacgttgaagtataacggtcgatagtcctaaactagactagcgcggtccccacgcgcccgaccaaaacaaccgcgtgcaagaatccaacccaccactcacaccccaacctgccgctcccttgcgtgtctttttcgcgattgaattgaaaaagtcgcctagtctgctgctccgcagctgcagttctgaattgggacgcgacccgcgcctaacattccgcgagccgactgccccgacctcaattcaaccgtgccacaaccctatacacacattaggtacccattgatcaacaaacggtctgattcggcaagaccgtgtcgagatcgatcagccgtttaggggggttaactcgagtccagcattcatacgcacacgggaatcgcgcttgttgttcctccaggaagcctcttcaaccaggggtatttgactggagaacaggacgtcacgaagcgactagtcgacaccggaacgggggtgtttgctttgccacccctaggtttattcccgagcacaataaccccgcgtgaacccctcctgacatgacagtcgcggtcctggcgaccacaacgaccaagacaaagcgtcgccaaccgctggggacgatttcaatggccggtccgaagacacaatcgcgctctgcaactgcgtacagtggaaccgtgaaggccaaggaacagaggactacgcgactcagcgcaagtaaacaagatctcgagcagagcacaaacaagctagggaagcggccagctggtgagtaatgtgccggggttggaagttgttgagcggtgttgaaagaatatgctaattcatctctagtggcatatgaggaggatgcagaagggttccagttctctctactaccatcaaagaagcccaggccatcaatcgaagcggtcccggaaatgccccattcagacgtggaaaatgcgcctcccaagtccacgccgaaaagaggacgcccacgaaaaaagccaacgggcgacgagaccacttcaagtacggtgccagcaaaggggaaaagcattgagcttccaagtaggagacctacgagaggaactgcgaagactacacacacagaatctgaatctcaaccaacaaacacgattcgcccatcacgaactcgcgacagcccagagcaccagccggaggcaaaaaagccgaaaaaagcaggacgaccaccaaaagccaaaaaacaagtgcaagtgtctgagtcaaatggatataattccccagtgcaaccgccagagggtacaaaggtggcactgccggtggccgatactccggtgattcagcgcaataaagagttcagaggcggaaagggtgataaaaacgataaagggcgacggcgaagcagcttgggtatgcgaggacgaagggccagttttttgatcgactcagggacatcaaatggtaagattctcggtctgcatgggctataaatggtcgaatgctgattttgtctcttttcttgtacagcattaccccatagagaagttggcacagcagatttttacaagcacatcgccgatgacggaatccctgaaccgcgaaggatgcgacaactattgatttggtgtgcgactcgtgcactaggggaaaagccctcaggaggctccaactcggacgatcaaagtgcgcgcttagcaggtacgtggaaccgtttacttacctagagggattttttatctgaccatttctagcgcgtgtgattcaagaggagcttcttcaggatttttcaaacaactcggagctttccaactggcttggtcgcgaagatttgaaccctccagccgtggtggtcaaaaaaccgaacccgcgaaacctgcaaaatacagacaagattaaggaattggaggagcatatacagaagtatgtgtatcaccaagagctgtctcgagtgtatagaactaacgaacttccagattacacaaagaaagacaatctctcaatgcgcttcttcgacagccagcgatcccaaccgttaaggctaaacctcaatctgacgacctacacaaagataagcaaacttcacgtaaatcacaacgcgaagaagtcgacccctctctcctcgatccctcacaacaagccatactagaattccttaatctcccgaatcagccagagggagaatcctctgccccatcctcaatccgaccacctatcacaccatctgccgtctctgctcaattatcacgcatcacatctgggctggcaccgacactcgatgccttcgcagccggtgtacatgacatcgaactataccgtgcctccgcggataccgtttcatcccgaatattacgcatctgtgcacagcgactggaagagcgcgatgcgcagaacacacaacgtcgcctcgcaatagaaggcaacgatgatgaacatccaccaccaacgagaattaaggaagatttgggtctcattctgggagctcttagtcgggtggagagacgatagaaaatactgttcattcgcttttctaggagatttctcctacgtatattcccaataatctgttttccagcgattcggcattcgttttcctttcttccttttttctgttcccttcggggattcaccatgaatgaattgattgatagcgatgatcttgacgaaaccccagcccaacaccatgggatggggaaaggcgcatttacaatggcatttcaattgtttgataagctcagagtttggggtttggatttgcaattctgagatatctgatgctccgcaaagtgcagagattcaagatgaagtgaataggtagtcaggtacctaatacatgccgtcaactaataaaaggctagaattgagatacttattcgatcccatctctacttcactggtcttgatataagttttagttttgagctcatggattctaggcgtcgatcttataggcccaggcgccttccttaacgagcttagtcagggatgctctcgacttgcttcttacagtgacggtgcataagtttggacacctcttcgtcgagattctccaatttcgggcttctcaccttcgcgctctcttccaaatcttcacacgagctctatcacaaactcaaagtccatccgaactggggatatgtcatatatcgcaccacttattcccctgaatctgacgcccacttctccactgcggtcaagtatgtcgaggcctttgtcaagaaatcattctttagggaatgcgcatctaaaaacgagagttcacctagcgtagatcccgccatttacgaggaaatccaggccaaatatagttcaaccgtcatagaagatgcggctctctttgatggtgcctcaattgattcgatacgcgctcattttgaggcatgggtggatgtccagggtcagcgtgattctttcaacaaataccgaatgtgcatagtcattgatgaggaatgtctgcaaacgctgctgggtacatcggcggaggccctagagcaggagactgaatacaagagagacaaaacaaagcgttatgtaaaaatcgagcacgctgcttcacccccggctattgtccttcgatatctagatgacgatcttttagaagcatccaatagccaacgcctcatcgacagacatcaagcccaccaatgtactagtgaactacggaaatggcgaatcctattccgtcatatttcgctaagatacatacaacgacaaagttcagacaaacagttttgttcttcccatctcgatattcatatatgacaccccagatgaaaaactaagaaaataaaaggacaggcacacgcgaaaggagagcctcgatgagtttagtcgtgactcgtgagaatcgtagcttctatatatgtccaaacggagaaggtcgggatagttagtcgatatagacttgatcggcgaggaaaatagagggaaagaaagaccgagatgacgcagcaaagaggctaataatactagcctttgcatttgccagtctcataaaacagaaaacaat
